(19) United States
(12) Patent Application Publication
(10) Pub. No.: US 2013/0052694 A1
(43) Pub. Date: Feb. 28, 2013

(54) NOVEL CELLOBIOHYDROLASE ENZYMES

(71) Applicants: Jacqueline Montalibet, Manotick (CA); Loreta Gudynaite-Savitch, Kanata (CA); Christopher Hill, Nepean (CA); Christopher D. Hindle, Gloucester (CA); James A. Lavigne, Nepean (CA); Nabil Masri, Gatineau (CA); Fuad Tahna, Ottawa (CA); John J. Tomashek, Ottawa (CA)

(72) Inventors: Jacqueline Montalibet, Manotick (CA); Loreta Gudynaite-Savitch, Kanata (CA); Christopher Hill, Nepean (CA); Christopher D. Hindle, Gloucester (CA); James A. Lavigne, Nepean (CA); Nabil Masri, Gatineau (CA); Fuad Tahna, Ottawa (CA); John J. Tomashek, Ottawa (CA)

(73) Assignee: Iogen Energy Corporation, Ottawa (CA)

(21) Appl. No.: 13/593,735

(22) Filed: Aug. 24, 2012

Related U.S. Application Data
(60) Provisional application No. 61/529,333, filed on Aug. 31, 2011.

(51) Int. Cl. C12N 9/42; C12P 19/14; C12N 1/19; C12N 1/21; C12N 15/63; C12N 1/15

(52) U.S. Cl. 435/99; 435/209; 435/320.1; 435/254.11; 435/254.21; 435/254.23; 435/254.6; 435/254.3; 435/252.35

(57) ABSTRACT

Provided are isolated cellobiohydrolases comprising a modified Glycoside Hydrolase (GH) Family 7 catalytic domain, a GH Family 7 catalytic domain and a modified Family 1 carbohydrate binding module (CBM), or both a modified Family 7 catalytic domain and a modified Family 1 CBM. Such isolated cellobiohydrolases exhibit from 45% to about 99.9% amino acid sequence identity to amino acids 1-436 of SEQ ID NO: 1 or to amino acids 1-438 of SEQ ID NO: 2 and improved activity on process substrates. Also provided are genetic constructs and genetically modified microbes for expressing the isolated cellobiohydrolases, a process for producing the isolated cellobiohydrolases, cellulase enzyme mixtures comprising the isolated cellobiohydrolase and a process for hydrolysing a cellulosic substrate with such cellulase enzyme mixtures.

### FIELD OF THE INVENTION

[0001] The present invention relates to isolated cellobiohydrolase enzymes. More specifically, the invention relates to isolated cellobiohydrolase enzymes of Glycosyl Hydrolase Family 7. The present invention also relates to genetic constructs comprising nucleotide sequences encoding for isolated cellobiohydrolase enzymes, methods for the production of the isolated cellobiohydrolase enzymes from host strains and the use of the isolated cellobiohydrolase enzymes in the hydrolysis of cellulose.

### BACKGROUND OF THE INVENTION

[0002] Lignocellulosic feedstocks are a promising alternative to corn starch for the production of fuel ethanol. These raw materials are widely available, inexpensive and several studies have concluded that cellulosic ethanol generates close to zero greenhouse gas emissions.

[0003] However, these feedstocks are not easily broken down into their composite sugar molecules. Recalcitrance of lignocellulose can be partially overcome by physical and/or chemical pretreatment. An example of a chemical pretreatment is steam explosion in the presence of dilute sulfuric acid (U.S. Pat. No. 4,461,648). This process removes most of the hemicellulose, but there is little conversion of the cellulose to glucose. The pretreated material may then be hydrolyzed by cellulase enzymes.

[0004] The term cellulase broadly refers to enzymes that catalyze the hydrolysis of the beta-1,4-glucosidic bonds joining individual glucose units in the cellulose polymer. Cellulases belong to the larger group of glycosyl hydrolases (GHs) which are organized in families and clans based on structural homology (Davies and Henrissat, 1995, Structure 15:853; Carbohydrate Active Enzymes database, Cantarel et al., 2009, Nucleic Acids Res., 37:D233). An updated database of members of the over 100 families of GH enzymes may be found at URL: www.cazy.org/Glycoside-Hydrolases/html. GHs include enzymes that catalyze the hydrolysis of other oligo- and poly-saccharides (e.g. glucanases, xylanases, mannosidases, galactosidases, etc.).

[0005] The conversion of cellulose to glucose involves the synergistic actions of endoglucanases (E.C. 3.2.1.4), cellobiohydrolases (E.C. 3.2.1.91) and beta-glucosidases (E.C. 3.2.1.21) (Henrissat et al, 1994; Knowles et al., 1987; Lynd et al., 2002; Teeri, 1997; Wood and Garcia-Campayo, 1990; Zhang and Lynd, 2004). Endoglucanases hydrolyze accessible glycosidic bonds in the middle of the cellulose chain, while cellobiohydrolases processively release cellobiose from these chain ends. Beta-glucosidases hydrolyze cellobiose to glucose thus minimizing product inhibition of the cellobiohydrolases and endoglucanases.

[0006] Although cellulases drive hydrolysis of cellulose to glucose, additional enzymes have been discovered that enhance the efficiency of a cellulase system. These enzymes may include hemicellulases, which break down xylan and other hemicellulosic material in biomass (Maheshwari et al., 2000, Microbiol Mol Biol Rev. 64:461); swollenins and expansins, which rearrange the structure of cellulose (Saloheimo et al, 2002, Eur. J. Biochem. 269:4202; Sampedro and Cosgrove, 2005, Genome Biol. 6:242); and partially or uncharacterized activities such as the GH Family 61 enzymes (Harris et al., 2010, Biochemistry 49:3305) and the cellulose-induced proteins (CIPs—Foreman et al., 2003, J. Biol. Chem. 278:31988). High efficiency cellulase systems for the conversion of lignocellulosic substrates will incorporate any or all of these enzymes depending on the composition of the biomass and the process conditions (Henrissat et al., 1985, Bio/technology 3:722; Baker et al., 1998, Appl. Biochem. Biotechnol. 70-72:395; Boisset et al., 2001, Biotechnol. Bioeng. 72:339; Berlin et al., 2007, Biotechnol. Bioeng. 97:287; Gusakov et al., 2007, Biotechnol. Bioeng. 97:1028; WO2008/025165; WO2009/026722; Meyer et al., 2009, J. Cereal Sci. 50:337).

[0007] Cellulases—as well as other GH enzymes—share common gross structures and mechanisms of catalysis (Teeri et al., 1992, Biotechnology 21:417). All GH enzymes have a catalytic domain (CD) and the particular structure of this domain determines its GH Family designation, of which there are over 100. Two general catalytic mechanisms have been identified for GHs and all enzymes from a given family will have a common mechanism (McCarter and Withers, 1994, Curr. Opin. Struct. Biol. 4:885; Zechel and Withers, 2000, Acc. Chem. Res. 33:11). Retaining enzymes, which retain the anomeric configuration of the reducing end, hydrolyze by means of a double displacement reaction wherein the reducing side of the target linkage is first displaced and covalently attached to an acidic residue in the active site, followed by a second displacement, usually by water (though possibly by other hydroxyl-containing compounds including sugars) to complete the displacement (White and Rose, 1997, Curr. Op. Struct. Biol. 7:645). Inverting enzymes, which invert the configuration of the anomeric carbon, have an activated water to which the reducing end of the target linkage is directly displaced.

[0008] Cellulases, as well as many hemicellulases and enzymes accessory to cellulose hydrolysis, often have a carbohydrate binding module (CBM) also referred to as a cellulose binding domain (CBD) in the case of cellulases. One function of the CBM is to facilitate contact of the CD with the substrate. Some research suggests that certain CBMs may also disrupt cellulose structure and thus facilitate catalytic activity by the CD (Din et al., 1994, Proc. Natl. Acad. Sci. U.S.A. 91:11383; Teeri et al., 1992, Biotechnology 21:417). There are three general types of CBM represented in over 40 different families. Of these, Type I CBMs bind to the surface of crystalline cellulase; Family 1 CBMs belong to Type I and are the only type found in glycosyl hydrolases from filamentous fungi. Structurally, a CBM/CBD may be nearly contiguous with the CD, but usually these domains are connected by an unstructured, often glycosylated, linker peptide typically of 10 to 50 residues in length that may be involved in cellulose interactions (Srisodsuk et al., 1993, J. Biol. Chem. 268:20756).

[0009] The cellobiohydrolases are the primary drivers of cellulose hydrolysis. These enzymes bind to the free ends of cellulose chains and catalyze, often processively, the cleavage of cellobiose units from the chain ends. Thus, cellobiohydrolases catalyze the majority of reactions that release soluble oligosaccharides from the solid cellulose substrate and make them available for further hydrolysis to glucose. There are two major classes of CBH (Barr et al., 1996, Biochemistry 35:586). Cellobiohydrolase 2 (CBH2 or CBHII) enzymes are inverting enzymes that hydrolyze from the non-reducing end of the cellulose chain; most CBH2 enzymes are found in GH Family 6. Cellobiohydrolase 1 (CBH1 or CBHI) enzymes are retaining enzymes that hydrolyze from the reducing end of the cellulose chain; most CBH1 enzymes are found in GH Family 7. CBH-like enzyme activities exist in other GH Families (e.g. Family 9 and 48). The activities of, and synergy between, CBH1 and CBH2 accounts for a majority of total cellulase activity from most fungal systems.

[0010] Glycoside hydrolase enzymes comprising Family 7 CDs are found in eukaryotes, primarily fungi, and comprise both exo- and endo-glucanases. GH Family 7 enzymes are mostly cellulases, although chitosanase and xylanase activities have also been reported. The family is distinguished by a beta-jelly roll core structure, with much of the protein in random coil held together by disulfide bonds. Exoglucanases of this family, in contrast to endoglucanases, have peptide loops that cover the active site cleft, turning it into a closed tunnel that channels a cellulose chain past the active site residues and enables high processivity (Kleywegt et al., 1997, J Mol Biol. 272:383). The active site tunnel or cleft consists of a series of monomer (glucose in the case of cellulose) binding sites that associate with the polysaccharide chain by means of ring stacking interactions between the sugar residues and aromatic side chains in the cleft. In the case of cellulases, the bound cellulose is thus correctly aligned with two acidic residues at the active site which catalyze the double displacement hydrolysis. The monomer binding sites are numbered from the point of catalysis, with positive numbers proceeding in the direction of the reducing end of the cellulose chain, and negative numbers in the direction of the non-reducing end. Therefore, the catalytic site lies between +1 and −1 sites, and for the Cel7 cellobiohydrolases, the product binding site would be the +1 and +2 sites which would be occupied by cellobiose after the initial displacement (Divne et al., 1998, J. Mol. Biol. 275:309).

[0011] Cellulases and other GHs are produced by a wide range of organisms for a variety of natural purposes. Cellulases are predominantly enzymes secreted by micro-organisms—bacteria and fungi—to obtain nutrients from the environment. Bacteria often secret enzymes that are linked together in an extended, non-covalently associated structure called the cellulosome (Fontes and Gilbert, 2010, Annu Rev Biochem. 79:655). Fungi typically express individual enzymes, though some fungi, such as those living in the rumen of ruminant animals (e.g. sheep and cattle), can also form extended cellulosome-like structures (Ljungdahl, 2008, Ann. N.Y. Acad. Sci. 1125:308). The precise enzymes and enzyme ratios that an organism expresses will be determined by the substrates upon which they have evolved and the current substrate upon which they are growing. Expression of most cellulases and hemicellulases is induced by small molecules related to the target substrate (Schmoll and Kubicek, 2003, Acta Microbiol Immunol Hung. 50:125; Mach and Zeilinger, 2003, Appl Microbiol Biotechnol. 60:515).

[0012] The mesophilic fungus Trichoderma reesei (the anamorph of Hypocrea jecorina) and the thermophilic fungus Myceliophthora thermophila (the anamorph of Thielavia heterothallica) are major sources for industrially useful glycoside hydrolases. Both secrete large amounts of protein comprised mostly of hydrolytic enzymes, and for this reason are useful production hosts for industrial enzymes.

[0013] T. reesei secretes two GH Family 7 enzymes, CBH1 (Cel7A) and EG1 (Cel7B), of which the Cel7A is the major secreted protein product. The three-dimensional structures of the catalytic domains of both Cel7A and Cel7B have been solved (Divne, et al., 1998, J. Mol. Biol. 275: 309-325; Kleywegt et al., 1997, J. Biol. Chem. 272: 383-397) as have structures for several other Family 7 enzymes. M. thermophila secretes at least three GH Family 7 enzymes. Other industrially relevant cellulases come from fungi including, but are not limited to, species of Aspergillus, Chaetomium, Chrysosporium, Coprinus, Corynascus, Fomitopsis, Fusarium, Humicola, Magnaporthe, Melanocarpus, Myceliophthora, Neurospora, Phanerochaete, Podospora, Rhizomucor, Sporotrichum, Talaromyces, Thermoascus, Thermomyces and Thielavia.

[0014] GHs, particularly cellulases and hemicellulases, have many useful applications in industry. Cellulases are used in the textile industry for biopolishing, denim abrasion, and detergent applications (e.g. Anish et al., 2007, Biotechnol Bioeng. 96:48; Montazer et al., 2010, Appl Biochem Biotechnol. 160:2114; Shimonaka et al., 2006, Biosci Biotechnol Biochem. 70:1013). Glucanases and xylanases are used in the brewing and baking industries to reduce viscosity and improve product texture (e.g. Bai et al., 2010, Appl Microbiol Biotechnol. 87:251). Hemicellulases, particularly xylanases, are used in the pulp and paper industry to improve bleachability, improve process efficiency and modify paper quality and attributes (e.g. Suurnäkki et al., 1997, Adv Biochem Eng Biotechnol. 57:261). Finally, cellulases are being used to hydrolyze cellulose to sugars for fermentation to value added products, particularly biofuels and fuel grade ethanol (Dashtban et al., 2009, Int J Biol Sci. 5:578). Because GH Family 7 cellobiohydrolases are recognized as primary drivers of cellulose hydrolysis in cellulase enzyme systems, intense efforts have been made to improve these enzymes using the methods of modern molecular biology.

[0015] Targets for enzyme improvement depend upon the process conditions and the end goal of the enzyme application. Common improvement targets are thermostability and thermophilicity to enable enzymes to work at high process temperatures. Higher process temperatures are favored to increase reaction rates and decrease the likelihood of microbial contamination. Another common target is pH optimum and range, which may need to be aligned between enzyme and process. Reducing enzyme inhibition and inactivation by process-specific factors, including product inhibition, may be important for certain process configurations. Finally, increasing the specific activity of an enzyme under process conditions is always desirable. Targets for enzyme modification are far ranging and highly specific to the process and end goal. One general target may be broadening, narrowing, or changing the substrate specificity. Another general target might be limiting the stereochemistry of a reaction.

[0016] Many approaches have been developed to improve and/or modify the attributes of an enzyme. These run a gamut from rational design to directed evolution. For rational design, the structure/function relationship of the protein is carefully considered and conscious design changes are made based on an understanding of protein biochemistry (e.g. Wohlfahrt et al., 2003, Biochemistry 42:10095). For directed evolution, a library of enzyme variants comprising random changes throughout the amino acid sequence is made and the library is screened by means of an assay to identify improved/altered variants (Arnold and Moore, 1997, Adv Biochem Eng Biotechnol. 58:1; Kim et al., 2000, Appl Environ Microbiol. 66:788). A great many hybrid approaches also exist, sometimes referred to as “semi-rational” design. For example, it has been known for a long time that the consensus sequence of a protein family is often more stable than individual members (Lehmann et al., 2000, Biochim Biophys Acta. 1543:408; Lehmann and Wyss, 2001, Curr Opin Biotechnol. 12:371). Therefore, one approach to generating more stable enzymes is to mutate non-consensus residues to the consensus sequence. Another example is the SCHEMA approach involves the random swapping of structurally defined domains from several members of a common protein family and then screening for improved/altered variants by means of an assay (Silberg et al., 2004, Methods Enzymol. 388:35; Heinzelman et al., 2009, Proc Natl Acad Sci USA. 106:5610). A third example is the ProSar algorithm which uses information from initial random screens to design secondary and tertiary recombinants for screening (Fox et al., 2003, Protein Eng. 16:589).

[0017] GH Family 7 enzymes have been an area of intense investigation and development for commercial applications. For example, the Trichoderma Cel7A has been mutated by rational design to alter the pH optimum and thermostability of the enzyme (Becker et al., 2001, Biochem J. 356:19; Boer and Koivula, 2003, Eur J Biochem. 270:841). A Cel7A consensus sequence has been constructed and expressed, and shown to be more thermostable than the Trichoderma Cel7A enzyme (U.S. Publication No. 2005/0054039). The SCHEMA approach has been applied to create hybrid Cel7A enzymes of increased thermostability (Heinzelman et al., 2010, Protein Eng Des Sel. 23:871). Random mutagenesis has also been applied to identify improved Trichoderma Cel7A variants. Both rational design and directed evolution have been applied to improve the thermostability of Cel7B from Melanocarpus (Voutilainen et al., 2007, Enz Microb Technol. 41:234; Voutilainen et al., 2009, Appl Microbiol Biotechnol. 83:261). A similar rational design approach was applied to stabilize Cel7A from Talaromyces, and serendipitously improved the specific activity in one instance (Voutilainen et al., 2010, Protein Eng Des Sel. 23:69). The CBM of the Trichoderma Cel7A has been engineered to make binding to cellulose pH-sensitive and thus reversible under process conditions, enabling the possibility of enzyme recycling (Reinikainen et al., 1992, Proteins 14:475; Reinikainen et al., 1995, Proteins 22:392; Linder et al., 1999, FEBS Lett. 447:13). The K_{M} of the Humicola Cel7 endoglucanase was lowered by rational design mutations that create an additional sugar monomer binding site (Davies et al., 1997, J Biotechnol. 57:91.

[0018] Well-designed assays are key to the successful identification of improved enzymes, particularly in the case of stochastic methods (e.g. directed evolution). Although soluble chromogenic and fluorogenic substrates have been developed for detecting the activity of GH enzymes and may be used in some screening assays, the performance of a GH enzyme on these artificial substrates often does not correlate to activity on a native or technical substrate such as cellulose or xylan. Instances where improvement on one substrate did not correlate to improvement on another have been documented (Teeri et al., 1998, Biochem Soc Trans. 26:173; Voutilainen et al., 2010, Protein Eng Des Sel. 23:69; Kuraŝin and Väljamäe, 2011, J Biol Chem. 286:169). Therefore, when screening for improved enzymes, it is critical to use process relevant substrates and conditions.

[0019] Variants of T. reesei (H. jecorina) Cel7A comprising a number of amino acid substitutions are disclosed in U.S. Pat. No. 7,951,570, U.S. Publication No. 2011/0229956, and U.S. Publication No. 2009/0075336. Variants of M. thermophile CBH1a comprising a number of amino acid substitutions are disclosed in U.S. Publication No. 2012/0003703. However, these variants were isolated by screening for improved thermostability or thermophilicity using soluble substrates rather than a cellulosic substrate. In some cases, the thermostable variants were subsequently characterized for their cellulose-hydrolyzing activity.

[0020] Here we present variants of T. reesei Cel7A isolated by screening for improved activity using process-relevant substrates under process-relevant conditions. Specific mutations conferring improvement were mapped to Cel7A cellobiohydrolases from other organisms to demonstrate that the improvements can be generalized to GH Family 7 enzymes.

### SUMMARY OF THE INVENTION

[0021] The present invention relates to isolated cellobiohydrolase enzymes. More specifically, the invention relates to isolated cellobiohydrolase enzymes of Glycosyl Hydrolase Family 7 with increased activity, reduced product inhibition or improved stability. Cellobiohydrolase enzymes of the present invention find utility in industrial processes requiring efficient conversion of cellobiose to glucose, particularly under conditions of high substrate concentrations or for the hydrolysis of lignocellulosic biomass.

[0022] In a first aspect, the invention relates to an isolated cellobiohydrolase enzyme comprising a modified Family 7 catalytic domain with one or more amino acid substitution at position 26, 39, 45, 46, 51, 52, 53, 54, 75, 87, 93, 95, 102, 111, 114, 129, 130, 131, 138, 139, 143, 144, 150, 155, 156, 181, 183, 184, 197, 209, 211, 219, 237, 241, 253, 260, 264, 271, 282, 314, 316, 324, 326, 339, 343, 351, 353, 358, 364, 368, 370, 373, 374, 375, 378, 379, 382, 383, 385, 390, 398, 400, 406, 419, 420, 423, 435, 436, or any combination thereof. The positions are determined from alignment of a parental Family 7 cellulase with SEQ ID NO: 1. The modified Family 7 catalytic domain comprises an amino acid sequence that exhibits from about 45% to about 99.9% sequence identity to amino acid 1-436 of SEQ ID NO: 1 or to amino acids 1-438 of SEQ ID NO: 2.

[0023] Such isolated cellobiohydrolase enzymes comprising a modified Family 7 catalytic domain as described above exhibit increased specific activity, reduced inhibition by glucose, reduced inactivation by lignin, increased activity in the presence of lignin, increased activity in the presence of lignocellulose hydrolysate, or any combination thereof, relative to a cellobiohydrolase comprising a parental Family 7 catalytic domain from which the modified Family 7 catalytic domain is derived.

[0024] In one embodiment, the modified Family 7 catalytic domain comprises one or more amino acid substitution at position 26, 39, 45, 46, 52, 53, 54, 87, 95, 102, 129, 130, 139, 143, 144, 183, 184, 197, 237, 241, 253, 264, 271, 282, 314, 316, 324, 326, 339, 343, 364, 368, 379, 382, 385, 390, 398, 406, 423, or any combination thereof.

[0025] In another embodiment, the modified Family 7 catalytic domain comprises one or more amino acid substitution selected from the group consisting of: X26A, X45D, X46A, X46L, X46T, X511, X52R, X52W, X53A, X53M, X53R, X53W, X54S, X54I, X54D, X75S, X87T, X93V, X95L, X95Y, X102R, X111T, X129S, X130N, X130E, X138S, X139E, X139M, X139Q, X139S, X139R, X143L, X143G, X144A, X144V, X150N, X181L, X183N, X184S, X197L, X197V, X197Q, X197W, X219S, X237T, X241L, X241R, X241V, X253R, X260D, X264C, X264Y, X271I, X326F, X343L, X351R, X353M, X364V, X368A, X373Y, X374V, X375A, X378E, X379C, X379E, X382L, X382Q, X382I, X383S, X385I, X385L, X390A, X390G, X390K, X390W, X390C, X390L, X390V, X400G, X406P, X419F, and X436D, and exhibits from about 65% to about 99.9% identical to amino acids 1-436 of SEQ ID NO: 1 or to amino acids 1-438 of SEQ ID NO: 2.

[0026] For example, the modified Family 7 catalytic domain may comprise one or more amino acid substitution selected from the group consisting of: X45D, X46A, X46L, X46T, X52R, X53A, X53M, X53R, X53W, X54S, X54I, X54D, X87T, X95L, X95Y, X102R, X129S, X130N, X139M, X139S, X139R, X143L, X143G, X144V, X183N, X184S, X197L, X197V, X197Q, X197W, X237T, X241L, X241R, X241V, X253R, X264C, X271I, X282I, X314A, X326F, X343L, X364V, X368A, X368G, X379C, X379E, X382L, X382Q, X382I, X383S, X385G, X385I, X385L, X390A, X390G, X390K, X390W, X390C, X390L, X390V, X398P, X406P, and X423Y, and exhibit from about 80% to about 99.9% identical to amino acids 1-436 of SEQ ID NO: 1 or to amino acids 1-438 of SEQ ID NO: 2.

[0027] In still another embodiment, the isolated cellobiohydrolase further comprises a carbohydrate binding module and a linker peptide positioned between the modified Family 7 catalytic domain and the carbohydrate binding module. For example, the carbohydrate binding module may be a Family 1 carbohydrate binding module exhibiting from about 50% to about 99% identity to amino acids 461 to 497 of SEQ ID NO: 1 or to amino acids and comprising, a serine at position 466, an aspartic acid at position 467, a serine at position 471, a valine or serine at position 483, an arginine at position 486, a threonine or glutamine at position 489, or any combination thereof. The position is determined from alignment of a parental Family 1 carbohydrate binding module with amino acids 461 to 497 of SEQ ID NO: 1.

[0028] In another aspect, the present invention relates to an isolated cellobiohydrolase comprising a Family 7 catalytic domain, a modified Family 1 carbohydrate binding module, and a linker peptide between the Family 7 catalytic domain and the modified Family 1 carbohydrate binding module. The modified Family 1 carbohydrate binding module comprises one or more amino acid substitutions selected from the group consisting of X466S, X467D, X471S, X483V, X483S, X486R, X489T, and X489Q and exhibits from about 50% to about 99% identity to amino acids 461 to 497 of SEQ ID NO: 1 or to amino acids 474 to 509 of SEQ ID NO: 2. The position(s) the amino acid substitutions are determined from alignment of a parental Family 1 carbohydrate binding module with amino acids 461 to 497 of SEQ ID NO: 1. Such isolated cellobiohydrolase exhibits increased specific activity, reduced inhibition by glucose, reduced inactivation by lignin, increased activity in the presence of lignin, increased activity in the presence of lignocellulose hydrolysate, or any combination thereof, relative to a cellobiohydrolase comprising a parental Family 1 carbohydrate binding domain from which the modified Family 1 carbohydrate binding domain is derived.

[0029] In another aspect, the present invention relates to an isolated Trichoderma reesei TrCel7A cellobiohydrolase comprising one or more amino acid substitution selected from the group consisting of: T26X, R39L, N45D, S46X, Y51I, D52X, G53X, N54X, G75X, S87X, I93X, F95X, A100X, K102X, L108X, M111X, D114X, F129X, D130X, V131X, P137X, C138X, G139X, A143X, L144X, D150X, V155X, S156X, K181X, I183X, N184X, P194X, N197X, N200X, C209X, S211X, N219X, I237X, D241X, G253X, G260X, N264X, P265X, T271X, L282X, P314X, A316X, N324X, L326X, G339X, F343X, Q351X, K353X, G358X, M364X, D368X, Y370X, A372X, N373X, M374X, L375X, D378X, S379X, S379X, P382X, T383X, E385X, P390X, V393X, S398X, S400X, Q406X, S419X, N420X, F423X, N431X, G435X, N436X, P437X, N441X, G444X, T446X, T447X, R450X, T453X, T454X, T455X, P459X, Q463X, Y466X, G467X, G471X, S475X, G476X, S482X, G483X, C486X, V488X, and L489X. Such isolated Trichoderma reesei TrCel7A cellobiohydrolase comprises an amino acid sequence that is from about 75% to about 99.9% identical to amino acids 1-497 of SEQ ID NO: 1.

[0030] In one embodiment, the isolated Trichoderma reesei TrCel7A cellobiohydrolase may comprise one or more amino acid substitution selected from the group consisting of T26A, T26S, R39L, N45D, S46G, S46A, S46I, S46L, S46T, Y51I, D52R, D52T, D52W, G53A, G53M, G53R, G53W, N54S, N54I, N54D, G75S, S87T, I93V, F95L, F95Y, A100T, A100V, A100W, A100L, A100G, K102S, K102R, L108I, M111T, D114E, F129S, D130N, D130E, V131A, P137S, C138S, G139E, G139M, G139Q, G139S, G139R, A143L, A143G, L144A, L144V, D150N, V155M, S156G, K181L, I183N, N184S, P194Q, N197L, N197V, N197Q, N197W, N197A, N200F, N200C, C209S, S211T, N219S, I237T, D241L, D241R, D241V, G253D, G253R, G260D, N264Y, T271I, L282I, P314A, A316V, N324D, L326F, G339D, F343L, Q351R, K353M, G358S, M364V, D368A, D368G, D378E, Y370H, A372T, N373Y, M374V, L375A, D378E, S379C, S379E, P382L, P382Q, P382I, T383S, T383A, E385G, E385I, E385L, P390A, P390G, P390K, P390W, P390C, P390L, P390V, S398P, S400G, Q406P, S419F, N420D, F423Y, N431R, G435S, N436D, P437T, N441D, G444D, T446A, T447S, R450S, T453I, T453S, T454I, T455A, P459L, Q463L, Q463S, Q463K, Y466S, G467D, G471S, S475N, G476D, S482N, G483V, G483S, C486R, V488D, L489P, and L489Q. Such isolated Trichoderma reesei TrCel7A cellobiohydrolase comprises an amino acid sequence that is from about 80% to about 99.9% identical to amino acids 1-497 of SEQ ID NO: 1.

[0031] For example, the isolated Trichoderma reesei TrCel7A cellobiohydrolase may comprise one or more amino acid substitution selected from the group consisting of T26S, R39L, N45D, S46G, S46A, S46L, S46T, D52R, G53A, G53M, G53R, G53W, N54S, N54I, N54D, S87T, A100T, A100V, A100W, A100L, A100G, K102R, F129S, D130N, G139M, G139S, G139R, A143L, A143G, L144V, I183N, N184S, N197L, N197V, N197Q, N197W, N197A, N200F, N200C, I237T, D241L, D241R, D241V, G253D, G253R, N264C, N264Y, T271I, L282I, P314A, A316V, N324D, L326F, G339D, F343L, G358S, M364V, D368A, D368G, A372T, S379C, P382L, P382Q, P382I, T383S, T383A, E385G, E385I, E385L, P390A, P390G, P390K, P390W, P390C, P390L, P390V, S398P, Q406P, F423Y, N431R, P437T, T446A, T447S, T454I, G467D, S475N, and G483V and exhibit from about 90% to about 99.9% identity to amino acids 1-497 of SEQ ID NO: 1.

[0032] The isolated Trichoderma reesei TrCel7A cellobiohydrolase as described above exhibits increased specific activity, reduced inhibition by glucose, reduced inactivation by lignin, increased activity in the presence of lignin, increased activity in the presence of lignocellulose hydrolysate, or any combination thereof, relative to a parental Trichoderma reesei TrCel7A cellobiohydrolase from which the isolated Trichoderma reesei TrCel7A cellobiohydrolase is derived.

[0033] In another aspect, the present invention relates to genetic constructs encoding the isolated cellobiohydrolase enzymes as described above.

[0034] In still another aspect, the present invention also relates to a genetically modified microbe comprising a genetic construct encoding the isolated cellobiohydrolase enzymes as described above. The genetically modified microbe may be a yeast or filamentous fungus. For example, the genetically modified microbe may be a species of Saccharomyces, Pichia, Hansenula, Trichoderma, Hypocrea, Aspergillus, Fusarium, Humicola, Chrysosporium, Myceliophthora, Thielavia, Sporotrichum or Neurospora, or a taxonomically equivalent genus thereof.

[0035] In still another aspect, the present invention also relates to a process for producing the isolated cellobiohydrolase, as described above, comprising transforming a host microbe with a genetic construct encoding the isolated cellobiohydrolase, selecting a genetically modified microbe expressing the isolated cellobiohydrolase and culturing the genetically modified microbe under conditions that enable the expression of the isolated cellobiohydrolase from the genetic construct.

[0036] In still another aspect, the present invention relates to a cellulase enzyme mixture comprising the isolated cellobiohydrolase, as described above.

[0037] In still another aspect, the present invention relates to a process for the hydrolyzing a cellulose substrate with a cellulase enzyme mixture comprising the isolated cellobiohydrolase, as described above. In one embodiment, the cellulose substrate is a pretreated lignocellulosic feedstock such as, for example, corn stover, wheat straw, barley straw, rice straw, oat straw, canola straw, soybean stover, corn fiber, sugar beet pulp, pulp mill fines and rejects, sugar cane bagasse, hardwood, softwood, sawdust, switch grass, miscanthus, cord grass, and reed canary grass.

### BRIEF DESCRIPTION OF THE DRAWINGS

[0038] FIG. 1 shows a map of the plasmid vector pTr7Ap-NheI-KpnI-7aT-DRmUra3 used to direct the expression and secretion of isolated cellobiohydrolases in Trichoderma host strains.

[0039] FIG. 2 shows a map of the plasmid vector pTr7Ap′-NheI-KpnI-7aT-DRmUra3 used to direct the expression and secretion of isolated cellobiohydrolases in Trichoderma host strains.

[0040] FIG. 3 provides (a) an alignment of the amino acid sequences of fungal Family 7 catalytic domains and (b) a graphical representation of the relative occurrence of each amino acid in a consensus Family 7 catalytic domain.

[0041] FIG. 4 provides an alignment of the TrCel7A (SEQ ID NO: 1) and MtCel7A (SEQ ID NO: 2) cellobiohydrolases.

[0042] FIG. 5 provides an alignment of the amino acid sequences of fungal Family 1 carbohydrate binding modules.

### DETAILED DESCRIPTION OF THE INVENTION

[0043] The present invention relates to isolated cellobiohydrolase enzymes. More specifically, the invention relates to isolated cellobiohydrolases comprising a modified catalytic domain belonging to Glycoside Hydrolase Family 7 and exhibiting increased specific activity, reduced inhibition by glucose, reduced inactivation by lignin, increased activity in the presence of lignin, increased activity in the presence of lignocellulose hydrolysates, or combinations thereof. The present invention also relates to genetic constructs encoding the isolated cellobiohydrolase enzymes, methods for the production of the isolated cellobiohydrolase enzymes from host strains and a process for hydrolysing of cellulosic substrates, such as pretreated lignocellulosic feedstocks, with the isolated cellobiohydrolases.

[0044] The following description is of a preferred embodiment by way of example only and without limitation to the combination of features necessary for carrying the invention into effect. The headings provided are not meant to be limiting of the various embodiments of the invention. Terms such as “comprises”, “comprising”, “comprise”, “includes”, “including” and “include” are not meant to be limiting. In addition, the use of the singular includes the plural, and “or” means “and/or” unless otherwise stated. Unless otherwise defined herein, all technical and scientific terms used herein have the same meaning as commonly understood by one of ordinary skill in the art.

### Family 7 Cellobiohydrolases

[0045] As used herein, a Family 7 cellobiohydrolase (a Cel7 cellobiohydrolase, Cel7 CBH enzyme or Cel7 CBH) is a cellulase enzyme comprising a catalytic domain belonging to Glycoside Hydrolase (GH) Family 7 and which is capable of releasing cellobiose from the reducing end of a cellulose chain. For example, a Cel7 CBH may release cellobiose processively from the reducing end of a cellulose chain. Cellulase enzymes comprising a Family 7 catalytic domain from different source organisms are identified by a two-letter designation consisting of the first letters of the genus and species from which the Cel7 CBH is derived, and followed by a capital letter indicating the order in which a particular Cel7 was identified from that organism. For example, the Cel7 CBH enzymes from Trichoderma reesei (CBH1) and Myceliophthora thermophila (CBH1a) may be referred to as TrCel7A and MtCel7A, respectively.

[0046] A catalytic domain is classified into GH Family 7 if it exhibits similarity in its primary, secondary and tertiary protein structures relative to those of other Family 7 cellulases. For example, all Family 7 cellulases comprise two glutamic acid (E) residues which may serve as catalytic residues. These aspartic acid residues are found at positions 212 and 217 of Trichoderma reesei CBH1 (Divne, et al., 1998, J. Mol. Biol. 275: 309-325). The homologous glutamic acids in the M. thermophila CBH1a are found at positions 213 and 218 (FIG. 5).

[0047] Family 7 catalytic domains are distinguished by a beta-jelly roll core structure, with much of the protein in random coil held together by disulfide bonds. The three dimensional structures of several Family 7 cellulases are known: T. reesei Cel7A (Divne et al., 1994, Science 265 (6171): 524-528); T. reesei Cel7B (Kleywegt et al., 1997, J. Biol. Chem. 272: 383-397), Fusarium oxysporum Cel7B (Sulzenbacher, et al., 1996, Biochemistry 35(48): 15280-15287), Humicola insolens Cel7B (Davies, et al., 1997, J. Biotechnol. 57: 91-100), Melanocarpus albomyces Cel7B (Parkkinen et al., 2008, Protein Science 17: 1383-94), Phanerochaete chrysosporium Cel7D (Munoz et al., 2001, J. Mol. Biol. 314: 1097-1111), and Talaromyces emersonii Cel7A (Grassick et al., 2004, Eur. J. Biochem. 271: 495-4506).

[0048] Family 7 catalytic domains are found primarily in fungal cellulase enzymes. Non-limiting examples of cellulase enzymes comprising Family 7 catalytic domains are provided in Table 1.

TABLE 1
Fungal Family 7 Catalytic Domains

| | | | Identity with | Identity with |
|---|---|---|---|---|
| | GenBank | | amino acids 1- | amino acids 1- |
| | Accession | | 436 of SEQ ID | 438 of SEQ ID |
| Source Organism | Number | Abbreviated Name | NO: 1 | NO: 2 |
| Hypocrea koningii | CAA49596.1 | Hkon_CAA49596.1 | 100.0% | 61.5% |
| Hypocrea rufa | AAQ76092.1 | Hruf_AAQ76092.1 | 99.3% | 61.3% |
| Hypocrea rufa | BAA36215.1 | Hruf_BAA36215.1 | 96.3% | 61.1% |
| Hypocrea rufa | CAA37878.1 | Hruf_CAA37878.1 | 96.1% | 61.1% |
| Aspergillus niger | AAF04491.1 | Anig_AAF04491.1 | 64.7% | 60.5% |
| Talaromyces emersonii | AAL33603.2 | Teme_AAL33603.2 | 64.6% | 61.8% |
| Thermoascus aurantiacus | CAM98447.1 | Taur_CAM98447.1 | 64.6% | 67.0% |
| Penicillium occitanis | AAT99321.1 | Pocc_AAT99321.1 | 63.7% | 59.9% |
| Thermoascus aurantiacus | AAL83303.1 | Taur_AAL83303.1 | 63.7% | 65.9% |
| Acremonium thermophilum | CAM98445.1 | Athe_CAM98445.1 | 63.5% | 74.4% |
| Penicillium funiculosum | CAC85737.1 | Pfun_CAC85737.1 | 63.5% | 60.6% |
| Aspergillus niger | AAF04492.1 | Anig_AAF04492.1 | 61.9% | 62.1% |
| Penicillium janthinellum Biourge | CAA41780.1 | Pjan_CAA41780.1 | 61.7% | 60.8% |
| Chrysosporium lucknowense | AAQ38146.1 | Clue_AAQ38146.1 | 61.5% | 100.0% |
| Penicillium chrysogenum | AAV65115.1 | Pchr_AAV65115.1 | 60.6% | 62.8% |
| Aspergillus aculeatus | BAA25183.1 | Aacu_BAA25183.1 | 60.5% | 59.4% |
| Aspergillus nidulans | EAA66593.1 | Anid_EAA66593.1 | 60.4% | 64.4% |
| Emericella nidulans | AAM54070.1 | Enid_AAM54070.1 | 60.4% | 64.4% |
| Thielavia australiensis | CAD79782.1 | Taus_CAD79782.1 | 60.4% | 84.6% |
| Chaetomium thermophilum | CAM98448.1 | Cthe_CAM98448.1 | 60.0% | 80.9% |
| Chaetomium thermophilum | AAW64926.1 | Cthe_AAW64926.1 | 60.0% | 80.5% |
| Acremonium thermophilum | CAM98446.1 | Athe_CAM98446.1 | 58.8% | 60.4% |
| Humicola grisea var. thermoidea | CAA35159.1 | Hgri_CAA35159.1 | 58.2% | 81.4% |
| Humicola grisea var. thermoidea | BAA09785.1 | Hgri_BAA09785.1 | 58.2% | 81.6% |
| Claviceps purpurea | CAA68840.1 | Cpur_CAA68840.1 | 56.8% | 63.2% |
| Cochliobolus carbonum | AAC49089.1 | Ccar_AAC49089.1 | 55.6% | 61.9% |
| Phanerochaete chrysosporium | AAB46373.1 | Pchr_AAB46373.1 | 53.7% | 58.5% |
| Fusicoccum sp. | ABS82449.1 | Fsp._ABS82449.1 | 53.5% | 58.9% |
| Irpex lacteus | BAA76364.1 | Ilac_BAA76364.1 | 52.8% | 57.3% |
| Phanerochaete chrysosporium | CAA82761.1 | Pchr_CAA82761.1 | 52.4% | 60.8% |
| Irpex lacteus | BAA76363.1 | Ilac_BAA76363.1 | 51.5% | 55.9% |
| Humicola grisea var. thermoidea | AAD11942.1 | Hgri_AAD11942.1 | 50.0% | 57.6% |
| Chaetomium thermophilum | AAY89412.2 | Cthe_AAY89412.2 | 49.8% | 56.4% |
| Humicola grisea var. thermoidea | BAA74517.1 | Hgri_BAA74517.1 | 49.7% | 57.4% |
| Magnaporthe grisea | XP_367082.1 | Mgri_XP_367082.1 | 49.7% | 49.5% |
| Melanocarpus albomyces | AAU96164.1 | Malb_AAU96164.1 | 49.3% | 54.5% |
| Phanerochaete chrysosporium | CAA38274.1 | Pchr_CAA38274.1 | 49.1% | 53.2% |
| Volvariella volvacea | AAD41096.1 | Vvol_AAD41096.1 | 44.7% | 44.8% |

Full sequence of each enzyme from the accession number stated in the table (including CBM and signal peptide if any) were aligned with reference sequences (amino acids 1-436 of SEQ ID NO: 1 and amino acids 1-438 of SEQ ID NO: 2) using ClustalW Multiple Alignment tool, with default settings, found in the BioEdit software version 7.0.9.0(6/27/07). Percent identity with reference sequences was calculated only using sequences showing alignment to the reference sequences and after removing all amino acids before or after the reference sequences.

[0049] As shown in Table 1 and FIG. 3, there is a high degree of conservation of primary amino acid sequence among Family 7 cellobiohydrolases. Multiple amino acid sequence alignment of the Family 7 catalytic domains of 38 currently known fungal cellobiohydrolase enzymes shows that most naturally occurring Family 7 CBH catalytic domains exhibit from about 45% to about 100% amino acid sequence identity to amino acids 1-436 comprising the catalytic domain of TrCel7A (Table 1) and from about 45% to 100% amino acid sequence identity to amino acids 1-438 comprising the catalytic domain of MtCel7A. In particular, there are several regions of very high amino acid sequence conservation within the Family 7 catalytic domains of fungal cellobiohydrolases including, for example, from amino acids 165-188, 360-383 and 207-222, containing the catalytic amino acids 212 and 217.

[0050] By “TrCel7A cellobiohydrolase” or “TrCel7A” it is meant the Family 7 cellobiohydrolase produced by Trichoderma reesei defined by the amino acid sequence of SEQ ID NO: 1. TrCel7A cellobiohydrolase is also known as Trichoderma reesei exoglucanase I, cellobiohydrolase I or CBH1. By “native” or “wild type” TrCel7A (also annotated as TrCel7A^{wt}), it is meant the TrCel7A of SEQ ID NO: 1 without any amino acid substitutions.

[0051] By “MtCel7A cellobiohydrolase” or “MtCel7A” it is meant the Family 7 cellobiohydrolase produced by Myceliophthora thermophila defined by the amino acid sequence of SEQ ID NO: 2. MtCel7A cellobiohydrolase is also known as Myceliophthora thermophila cellobiohydrolase Ia or CBH1a. By “native” or “wild type” MtCel7A (also annotated as MtCel7A^{wt}), it is meant the MtCel7A of SEQ ID NO: 2 without any amino acid substitutions.

### Isolated Cellobiohydrolases

[0052] By “isolated cellobiohydrolase” or “isolated CBH”, it is meant an enzyme preparation comprising a CBH enzyme and no more than 10% of polypeptides with which it is naturally associated. For example, the enzyme preparation may comprise a CBH enzyme and no more than 8%, 6%, 4%, 2%, 1%, 0%, or any amount therebetween, of polypeptides with which it is naturally associated. The isolated cellobiohydrolase of the present invention may be produced by recombinant means from a genetically modified microbe, as described herein below.

[0053] In one aspect of the present invention, an isolated cellobiohydrolase comprises a modified Family 7 catalytic domain (a) having one or more amino acid substitution at position 26, 39, 45, 46, 51, 52, 53, 54, 75, 87, 93, 95, 102, 111, 114, 129, 130, 131, 138, 139, 143, 144, 150, 155, 156, 181, 183, 184, 193, 197, 209, 211, 219, 237, 241, 253, 260, 264, 271, 282, 314, 316, 324, 326, 339, 343, 351, 353, 358, 364, 368, 370, 373, 374, 375, 378, 379, 382, 383, 385, 390, 398, 400, 406, 419, 420, 423, 435, 436, or any combination thereof, the position(s) of such amino acid substitutions being determined by amino acid sequence alignment of a parental Family 7 catalytic domain, from which the modified Family 7 catalytic domain is derived, with amino acids 1-436 of SEQ ID NO: 1 or with amino acids 1-438 of SEQ ID NO: 2 and (b) exhibiting from about 47% to about 99.9% amino acid sequence identity to amino acids 1-436 of SEQ ID NO: 1 or to amino acids 1-438 of SEQ ID NO: 2. For example, the isolated cellobiohydrolase enzyme may comprise a modified Family 7 catalytic domain having one or more amino acid substitution at position 26, 39, 45, 46, 52, 53, 54, 87, 95, 102, 129, 130, 139, 143, 144, 183, 184, 197, 237, 241, 253, 264, 271, 282, 314, 316, 324, 326, 339, 343, 358, 364, 368, 379, 382, 385, 390, 398, 406, 423, or any combination thereof.

[0054] By “amino acid sequence alignment”, it is meant the alignment of one or more amino acid sequences to a reference sequence in order to optimize the sequence similarity between the aligned sequences. Methods for aligning two or more amino acid sequences include, but are not limited to, BLAST (BLAST and BLAST 2.0; Altschul et al., 1997 and 1990), the alignment algorithm of Smith & Waterman (1981), the homology alignment algorithm of Needleman & Wunsch (1970), the search for similarity method of Pearson & Lipman (1988), computerized implementations of these algorithms (GAP, BESTFIT, FASTA, and TFASTA in the Wisconsin Genetics Software Package, Genetics Computer Group, 575 Science Dr., Madison, Wis.), or by manual alignment and visual inspection. Alignments of 38 Family 7 catalytic domain amino acid sequences and 38 Family 1 carbohydrate binding module sequences are provided in FIGS. 1 and 2, respectively.

[0055] Once the alignment is complete, one of skill in the art can determine (a) the positions of the amino acids within a given parental Family 7 catalytic domain that correspond to those positions 26, 39, 45, 46, 51, 52, 53, 54, 75, 87, 93, 95, 102, 111, 114, 129, 130, 131, 138, 139, 143, 144, 150, 155, 156, 181, 183, 184, 197, 209, 211, 219, 237, 241, 253, 260, 264271, 282, 314, 316, 324, 326, 339, 343, 351, 353, 358, 364, 368, 370, 373, 374, 375, 378, 379, 382, 383, 385, 390, 398, 400, 406, 419, 420, 423, 435, and 436 of the TrCel7A cellobiohydrolase of SEQ ID NO: 1 and (b) the amino acid sequence identity of a given Family 7 catalytic domain sequence to amino acids 1-436 of SEQ ID NO: 1 or amino acids 1-438 of SEQ ID NO: 2.

[0056] By “parental Family 7 catalytic domain”, it is meant a Family 7 catalytic domain that does not contain a substitution of its original amino acid at position 26, 39, 45, 46, 51, 52, 53, 54, 75, 87, 93, 95, 102, 111, 114, 129, 130, 131, 138, 139, 143, 144, 150, 155, 156, 181, 183, 184, 197, 209, 211, 219, 237, 241, 253, 260, 264, 271, 282, 314, 316, 324, 326, 339, 343, 351, 353, 358, 364, 368, 370, 373, 374, 375, 378, 379, 382, 383, 385, 390, 398, 400, 406, 419, 420, 423, 435, 436, or any combination thereof. It will be understood that a parental Family 7 catalytic domain may be a wild-type or native Family 7 catalytic domain or a Family 7 catalytic domain that contains amino acid substitutions at positions other than 26, 39, 45, 46, 51, 52, 53, 54, 75, 87, 93, 95, 102, 111, 114, 129, 130, 131, 138, 139, 143, 144, 150, 155, 156, 181, 183, 184, 197, 209, 211, 219, 237, 241, 253, 260, 264271, 282, 314, 316, 324, 326, 339, 343, 351, 353, 358, 364, 368, 370, 373, 374, 375, 378, 379, 382, 383, 385, 390, 398, 400, 406, 419, 420, 423, 435, and/or 436.

[0057] A parental Family 7 catalytic domain may be derived from one or more cellulase enzymes from any source organism, including but not limited to species of Aspergillus, Chaetomium, Chrysosporium, Coprinus, Corynascus, Ctenomyces, Fomitopsis, Fusarium, Humicola, Magnaporthe, Melanocarpus, Myceliophthora, Neurospora, Phanerochaete, Podospora, Rhizomucor, Sporotrichum, Talaromyces, Thermoascus, Thermomyces and Thielavia. For example, a parental Family 7 catalytic domain may be derived from Trichoderma reesei Cel7A (SEQ ID NO: 1), Myceliophthora thermophile Cel7A (SEQ ID NO: 2), or from any cellulase comprising a Family 7 catalytic domain listed in Table 1.

[0058] In order to assist one of skill in the art regarding those amino acid positions a parental Family 7 catalytic domain at which amino acid substitutions (other than those present in the corresponding modified Family 7 catalytic domain) may be made and produce an active cellobiohydrolase, an alignment of 38 Family 7 catalytic domains derived from fungal sources along with a consensus Family 7 catalytic domain consisting of the amino acids that naturally occur with the highest frequency at each position is provided in FIG. 1 along with a graph showing the frequency of occurrence of each amino acid of the consensus sequence at each position. Using this information, one of skill in the art would recognize regions of low sequence conservation and choose such regions for introduction of amino acid substitutions that are not likely to compromise significantly the function of the enzyme. Non-limiting examples of such regions include, for example, the regions between positions 232-247, 309-322 and 327-359.

[0059] In another embodiment of the invention, the isolated cellobiohydrolase comprises a modified Family 7 catalytic domain (a) having one or more amino acid substitution selected from the group consisting of: X26A, X45D, X46A, X46L, X46T, X51I, X52R, X52W, X53A, X53M, X53R, X53W, X54S, X54I, X54D, X75S, X87T, X93V, X95L, X95Y, X102R, X111T, X129S, X130N, X130E, X138S, X139E, X139M, X139Q, X139S, X139R, X143L, X143G, X144A, X144V, X150N, X181L, X183N, X184S, X197L, X197V, X197Q, X197W, X219S, X237T, X241L, X241R, X241V, X253R, X260D, X264C, X264Y, X271I, X326F, X343L, X351R, X353M, X356I, X356A, X364V, X368A, X373Y, X374V, X375A, X378E, X379C, X379E, X382L, X382Q, X382I, X383S, X385I, X385L, X390A, X390G, X390K, X390W, X390C, X390L, X390V, X400G, X406P, X419F, and X436D, and (b) exhibits from about 65% to about 99.9% amino acid sequence identity to amino acids 1-436 of SEQ ID NO: 1 or to amino acids 1-438 of SEQ ID NO: 2. For example, the modified Family 7 catalytic domain may have one or more amino acid substitution selected from the group consisting of: X45D, X46A, X46L, X46T, X52R, X53A, X53M, X53R, X53W, X54S, X54I, X54D, X87T, X95L, X95Y, X102R, X129S, X130N, X139M, X139S, X139R, X143L, X143G, X144V, X183N, X184S, X197L, X197V, X197Q, X197W, X237T, X241L, X241R, X241V, X253R, X264C, X271I, X282I, X314A, X326F, X343L, X356I, X364V, X368A, X368G, X379C, X379E, X382L, X382Q, X382I, X383S, X385G, X385I, X385L, X390A, X390G, X390K, X390W, X390C, X390L, X390V, X398P, X406P, and X423Y.

[0060] In another embodiment, the isolated cellobiohydrolase comprising a modified Family 7 catalytic domain may further comprise a carbohydrate binding module (CBM) and a linker peptide positioned between the modified Family 7 catalytic domain and the carbohydrate binding module. For example, the CBM maybe a Family 1 CBM. By “Family 1 CBM” or “Family 1 carbohydrate binding module” it is meant any polypeptide that exhibits binding to crystalline cellulose and comprises an amino acid sequence that is classified as a Family 1 carbohydrate binding module (or Family 1 CBM) according to the CAZy system (see URL: cazy.org/Carbohydrate-Binding-Modules.html). FIG. 2 provides an alignment of 38 Family 1 CBM amino acid sequences showing the positions of the four highly conserved cysteines which form two disulfide bridges. Three aromatic amino acids (tryptophan, tyrosine or phenylalanine) are also conserved, form a planar surface and interact directly with the glucose units of the cellulose polymer via van der Waals' interactions. The identity of the 38 CBM sequences to the CBMs of TrCel7A and MtCel7a are provided in Table 2.

[0061] The term “linker peptide” is intended to be understood as a stretch of amino acids located between two functional domains and comprising from about 6 to about 60 amino acids. Linker peptides can be identified from amino acid sequence information using models (Bae, et al. (2008) Journal of the American Statistical Association, 103(483):1085-99; Suyama, and Ohara, (2003) Bioinformatics, 19(5):673-4). Gilkes et al., (1991 Microbiology Reviews, 55(2):303-315) presents the sequences of linkers from a variety of cellulases and other bacterial and fungal proteins encompassed by this definition. Linker peptides are typically basic peptides, particularly enriched in serine, threonine and proline, relative to non-linker sequences. As presented in Table I of Gilkes et al (1991), proline, serine and threonine account for 50% or more of the amino acids in all linker peptide sequences from bacterial and fungal glycoside hydrolases (xylanases, endoglucanases, exoglucanases). For the purposes defined herein, a linker peptide maybe be defined as a stretch of about 6 to about 60 amino acids, at least 50% of which are proline, serine or threonine, that is positioned between a catalytic domain and a CBM, two catalytic domains, two CBMs, or between another functional domain and either a catalytic domain or a CBM. Proline, serine and threonine may account for 50%, 60%, 70%, 80% 90% or 100% of the amino acids in the linker peptide ((# proline+threonine+serine)/# amino acids in linker×100%). One of skill in the art recognizes that the amino acid sequence of a given linker may be modified by the addition, deletion or substitution of one or more amino acids and still be considered a linker peptide.

[0062] In another aspect, the isolated cellobiohydrolase comprises a parental or modified Family 7 catalytic domain, a modified Family 1 CBM, and a linker peptide positioned therebetween, the modified Family 1 carbohydrate binding module exhibiting from about 50% to about 99% identity to amino acids 463 to 497 of SEQ ID NO: 1 or to amino acids 474 to 509 of SEQ ID NO: 2 and having one or more amino acid substitutions selected from the group consisting of X466S, X467D, X471S, X483V, X486R, X489T, X489Q, or any combination thereof, the position determined from alignment of a parental Family 1 carbohydrate binding module with amino acids 463 to 497 of SEQ ID NO: 1 or with amino acids 474 to 509 of SEQ ID NO: 2. As described above, there are many method several methods available for aligning the amino acid sequence of a parental Family 1 CBM to a reference Family 1 CBM such as amino acids 463 to 497 of SEQ ID NO: 1 or amino acids 474 to 509 of SEQ ID NO: 2 in order to determine (a) the positions of the amino acids within a given parental Family 1 CBM that correspond to positions 466, 467, 471, 483, 486, and 489 of SEQ ID NO: 1 and (b) the amino acid sequence identity of a given parental Family 1 CBM sequence to amino acids 463 to 497 of SEQ ID NO: 1 or with amino acids 474 to 509 of SEQ ID NO: 2.

[0063] The isolated cellobiohydrolase comprising a parental or modified Family 7 catalytic domain and a modified Family 1 CBM exhibits increased specific activity, reduced inhibition by glucose, reduced inactivation by lignin, increased activity in the presence of lignin, increased activity in the presence of lignocellulose hydrolysate, or any combination thereof, relative to a cellobiohydrolase comprising a parental Family 1 carbohydrate binding module from which the modified Family 1 carbohydrate binding domain is derived.

[0064] By “parental Family 1 carbohydrate binding module” it is meant a Family 1 carbohydrate binding module that does not contain a substitution of its original amino acid at position 466, 467, 471, 483, 486, 489 or any combination thereof. It will be understood that a parental Family 1 carbohydrate binding module may be a wild-type or native Family 1 carbohydrate binding module or a Family 1 carbohydrate binding module that contains amino acid substitutions at positions other than 466, 467, 471, 483, 486, and/or 489. A parental Family 1 carbohydrate binding module may be derived from one or more cellulase enzymes from any source organism, including but not limited to species of Aspergillus, Chaetomium, Chrysosporium, Coprinus, Corynascus, Ctenomyces, Fomitopsis, Fusarium, Humicola, Magnaporthe, Melanocarpus, Myceliophthora, Neurospora, Phanerochaete, Podospora, Rhizomucor, Sporotrichum, Talaromyces, Thermoascus, Thermomyces and Thielavia. For example, a parental Family 1 CBM may be derived from Trichoderma reesei Cel7A (SEQ ID NO: 1), Myceliophthora thermophile Cel7A (SEQ ID NO: 2), or from any cellulase comprising a Family 1 carbohydrate binding module listed in Table 2.

[0065] Family 1 carbohydrate binding modules are found primarily in fungal cellulase enzymes. Non-limiting examples of cellulase enzymes comprising Family 1 carbohydrate binding modules are provided in Table 2.

TABLE 2
Fungal Family 1 Carbohydrate Binding Modules

| | | | Identity with | Identity with |
|---|---|---|---|---|
| | GenBank | | amino acids | amino acids |
| | Accession | Abbreviated | 463-497 of SEQ | 474-509 of SEQ |
| Organism | Number | Name | ID NO: 1 | ID NO: 2 |
| Hypocrea koningii | CAA49596.1 | Hkon_CAA49596.1 | 97.2% | 61.1% |
| Hypocrea rufa | AAQ76092.1 | Hruf_AAQ76092.1 | 97.2% | 61.1% |
| Hypocrea rufa | BAA36215.1 | Hruf_BAA36215.1 | 91.6% | 61.1% |
| Hypocrea rufa | CAA37878.1 | Hruf_CAA37878.1 | 88.8% | 61.1% |
| Penicillium funiculosum | CAC85737.1 | Pfun_CAC85737.1 | 72.2% | 63.8% |
| Volvariella volvacea | AAD41096.1 | Vvol_AAD41096.1 | 72.2% | 58.3% |
| Penicillium occitanis | AAT99321.1 | Pocc_AAT99321.1 | 69.4% | 63.8% |
| Phanerochaete chrysosporium | AAB46373.1 | Pchr_AAB46373.1 | 66.6% | 58.3% |
| Aspergillus aculeatus | BAA25183.1 | Aacu_BAA25183.1 | 63.8% | 69.4% |
| Chaetomium thermophilum | CAM98448.1 | Cthe_CAM98448.1 | 63.8% | 58.3% |
| Chaetomium thermophilum | AAW64926.1 | Cthe_AAW64926.1 | 63.8% | 58.3% |
| Irpex lacteus | BAA76363.1 | Ilac_BAA76363.1 | 63.8% | 55.5% |
| Acremonium thermophilum | CAM98445.1 | Athe_CAM98445.1 | 61.1% | 66.6% |
| Aspergillus niger | AAF04492.1 | Anig_AAF04492.1 | 61.1% | 63.8% |
| Chrysosporium lucknowense | AAQ38146.1 | Cluc_AAQ38146.1 | 61.1% | 100.0% |
| Aspergillus nidulans | EAA66593.1 | Anid_EAA66593.1 | 58.3% | 66.6% |
| Emericella nidulans | AAM54070.1 | Enid_AAM54070.1 | 58.3% | 66.6% |
| Irpex lacteus | BAA76364.1 | Ilac_BAA76364.1 | 58.3% | 52.7% |
| Penicillium chrysogenum | AAV65115.1 | Pchr_AAV65115.1 | 58.3% | 63.8% |
| Phanerochaete chrysosporium | CAA82761.1 | Pchr_CAA82761.1 | 58.3% | 47.2% |
| Humicola grisea var. thermoidea | BAA09785.1 | Hgri_BAA09785.1 | 52.7% | 83.3% |
| Thielavia australiensis | CAD79782.1 | Taus_CAD79782.1 | 52.7% | 77.7% |
| Humicola grisea var. thermoidea | CAA35159.1 | Hgri_CAA35159.1 | 50.0% | 80.5% |
| Penicillium janthinellum Biourge | CAA41780.1 | Pjan_CAA41780.1 | 50.0% | 72.2% |

Full sequence of each enzyme from the accession number stated in the table (including CBM and signal peptide if any) were aligned with reference sequences (amino acids 463 to 497 of SEQ ID NO: 1 or amino acids 474 to 509 of SEQ ID NO: 2) using ClustalW Multiple Alignment tool, with default settings, found in the BioEdit software version 7.0.9.0(6/27/07). Percent identity with reference sequences was calculated only using sequences showing alignment to the reference sequences and after removing all amino acids before or after the reference sequences.

[0066] As used herein in respect of modified Family 7 catalytic domains or modified Family 1 CBMs, “derived from” refers to the isolation of a target nucleic acid sequence element encoding the desired modified Family 7 catalytic domain or Family 1 CBM using genetic material or nucleic acid or amino acid sequence information specific to the corresponding parental Family 7 catalytic domain or parental Family 1 CBM. As is known by one of skill in the art, such material or sequence information can be used to generate a nucleic acid sequence encoding the desired modified Family 7 catalytic domain or modified Family 1 CBM using one or more molecular biology techniques including, but not limited to, cloning, sub-cloning, amplification by PCR, in vitro synthesis, and the like.

[0067] In yet another aspect, the isolated cellobiohydrolase may be an isolated Trichoderma reesei TrCel7A cellobiohydrolase comprising one or more amino acid substitution selected from the group consisting of: T26X, R39L, N45D, S46X, Y51I, D52X, G53X, N54X, G75X, S87X, 193X, F95X, A100X, K102X, L108X, M111X, D114X, F129X, D130X, V131X, P137X, C138X, G139X, A143X, L144X, D150X, V155X, S156X, K181X, I183X, N184X, P194X, N197X, N200X, C209X, S211X, N219X, I237X, D241X, G253X, G260X, N264X, T271X, L282X, P314X, A316X, N324X, L326X, G339X, F343X, Q351X, K353X, T356X, G358X, M364X, D368X, Y370X, A372X, N373X, M374X, L375X, D378X, S379X, S379X, P382X, T383X, E385X, P390X, V393X, S398X, S400X, Q406X, S419X, N420X, F423X, N431X, G435X, N436X, P437X, N441X, G444X, T446X, T447X, R450X, T453X, T454X, T455X, P459X, Q463X, Y466X, G467X, G471X, S475X, G476X, S482X, G483X, G483X, C486X, V488X, and L489X, and exhibiting from about 75% to about 99.9% amino acid sequence identity to amino acids 1-497 of SEQ ID NO: 1.

[0068] For example, the isolated Trichoderma reesei TrCel7A cellobiohydrolase may comprise one or more amino acid substitution selected from the group consisting of: T26A, T26S, R39L, N45D, S46G, S46A, S46I, S46L, S46T, Y51I, D52R, D52T, D52W, G53A, G53M, G53R, G53W, N54S, N541, N54D, G75S, S87T, I93V, F95L, F95Y, A100T, A100V, A100W, A100L, A100G, K102S, K102R, L108I, M111T, D114E, F129S, D130N, D130E, V131A, P137S, C138S, G139E, G139M, G139Q, G139S, G139R, A143L, A143G, L144A, L144V, D150N, V155M, S156G, K181L, I183N, N184S, P194Q, N197L, N197V, N197Q, N197W, N197A, N200F, N200C, C209S, S211T, N219S, I237T, D241L, D241R, D241V, G253D, G253R, G260D, N264Y, T271I, L282I, P314A, A316V, N324D, L326F, G339D, F343L, Q351R, K353M, G358S, M364V, D368A, D368G, D378E, Y370H, A372T, N373Y, M374V, L375A, D378E, S379C, S379E, P382L, P382Q, P382I, T383S, T383A, E385G, E385I, E385L, P390A, P390G, P390K, P390W, P390C, P390L, P390V, V393A, S398P, S400G, Q406P, S419F, N420D, F423Y, N431R, G435S, N436D, P437T, N441D, G444D, T446A, T447S, R450S, T453I, T453S, T454I, T455A, P459L, Q463L, Q463S, Q463K, Y466S, G467D, G471S, S475N, G476D, S482N, G483V, G483S, C486R, V488D, L489P, and L489Q and exhibit from about 80% to about 99.9% amino acid sequence identity to amino acids 1-497 of SEQ ID NO: 1.

[0069] In one embodiment, the isolated Trichoderma reesei TrCel7A cellobiohydrolase may comprise one or more amino acid substitution selected from the group consisting of: T26S, R39L, N45D, S46G, S46A, S46L, S46T, D52R, G53A, G53M, G53R, G53W, N54S, N54I, N54D, S87T, A100T, A100V, A100W, A100L, A100G, K102R, F129S, D130N, G139M, G139S, G139R, A143L, A143G, L144V, I183N, N184S, N197L, N197V, N197Q, N197W, N197A, N200F, N200C, I237T, D241L, D241R, D241V, G253D, G253R, N264C, N264Y, T271I, T281A, L282I, P314A, A316V, N324D, L326F, G339D, F343L, T356I, G358S, M364V, D368A, D368G, A372T, S379C, P382L, P382Q, P382I, T383S, T383A, E385G, E385I, E385L, P390A, P390G, P390K, P390W, P390C, P390L, P390V, V393A, S398P, Q406P, F423Y, N431R, P437T, T446A, T447S, T454I, G467D, S475N, and G483V, and exhibit from about 90% to about 99.9% amino acid sequence identity to amino acids 1-497 of SEQ ID NO: 1.

[0070] The isolated TrCel7A cellobiohydrolase may be derived from the wild-type or native TrCel7A cellobiohydrolase of SEQ ID NO: 1 or from a parental TrCel7A cellobiohydrolase comprising amino acid deletions or insertions, or amino acid substitutions other than T26X, R39L, N45D, S46X, Y51I, D52X, G53X, N54X, G75X, S87X, I93X, F95X, A100X, K102X, L108X, M111X, D114X, F129X, D130X, V131X, P137X, C138X, G139X, A143X, L144X, D150X, V155X, S156X, K181X, I183X, N184X, P194X, N197X, N200X, C209X, S211X, N219X, I237X, D241X, D249X, G253X, G260X, N264X, T271X, L282X, P314X, A316X, N324X, L326X, G339X, F343X, Q351X, K353X, G358X, M364X, D368X, Y370X, A372X, N373X, M374X, L375X, D378X, S379X, S379X, P382X, T383X, E385X, P390X, V393X, S398X, S400X, Q406X, S419X, N420X, F423X, N431X, G435X, N436X, P437X, N441X, G444X, T446X, T447X, R450X, T453X, T454X, T455X, P459X, Q463X, Y466X, G467X, G471X, S475X, G476X, S482X, G483X, G483X, C486X, V488X, and L489X.

[0071] A list of isolated TrCel7A cellobiohydrolase in accordance with the present invention, which is not to be considered limiting in any manner, is presented in Table 3.

TABLE 3
Isolated Cellobiohydrolases derived from TrCel7A

| SEQ ID NO: | Isolated CBH |
|---|---|
| 3 | TrCel7A-P13H |
| 4 | TrCel7A-P13T |
| 5 | TrCel7A-G22D |
| 6 | TrCel7A-T26A |
| 7 | TrCel7A-T26S |
| 8 | TrCel7A-Q27L |
| 9 | TrCel7A-R39L |
| 10 | TrCel7A-N45D |
| 11 | TrCel7A-S46A |
| 12 | TrCel7A-S46G |
| 13 | TrCel7A-S46L |
| 14 | TrCel7A-S46T |
| 15 | TrCel7A-Y51I |
| 16 | TrCel7A-D52R |
| 17 | TrCel7A-D52T |
| 18 | TrCel7A-D52W |
| 19 | TrCel7A-G53A |
| 20 | TrCel7A-G53M |
| 21 | TrCel7A-G53R |
| 22 | TrCel7A-G53W |
| 23 | TrCel7A-N54D |
| 24 | TrCel7A-N54I |
| 25 | TrCel7A-N54S |
| 26 | TrCel7A-T59A |
| 27 | TrCel7A-G75S |
| 28 | TrCel7A-S87T |
| 29 | TrCel7A-G88V |
| 30 | TrCel7A-I93V |
| 31 | TrCel7A-F95L |
| 32 | TrCel7A-F95Y |
| 33 | TrCel7A-A100G |
| 34 | TrCel7A-A100L |
| 35 | TrCel7A-A100T |
| 36 | TrCel7A-A100V |
| 37 | TrCel7A-A100W |
| 38 | TrCel7A-K102R |
| 39 | TrCel7A-K102S |
| 40 | TrCel7A-L108I |
| 41 | TrCel7A-M111T |
| 42 | TrCel7A-D114E |
| 43 | TrCel7A-F129S |
| 44 | TrCel7A-D130E |
| 45 | TrCel7A-D130N |
| 46 | TrCel7A-V131A |
| 47 | TrCel7A-P137S |
| 48 | TrCel7A-C138S |
| 49 | TrCel7A-G139E |
| 50 | TrCel7A-G139M |
| 51 | TrCel7A-G139Q |
| 52 | TrCel7A-G139R |
| 53 | TrCel7A-G139S |
| 54 | TrCel7A-A143G |
| 55 | TrCel7A-A143L |
| 56 | TrCel7A-L144A |
| 57 | TrCel7A-L144V |
| 58 | TrCel7A-D150N |
| 59 | TrCel7A-V155M |
| 60 | TrCel7A-S156G |
| 61 | TrCel7A-K181L |
| 62 | TrCel7A-I183N |
| 63 | TrCel7A-N184S |
| 64 | TrCel7A-Q186K |
| 65 | TrCel7A-E193G |
| 66 | TrCel7A-P194Q |
| 67 | TrCel7A-N197A |
| 68 | TrCel7A-N197L |
| 69 | TrCel7A-N197Q |
| 70 | TrCel7A-N197V |
| 71 | TrCel7A-N197W |
| 72 | TrCel7A-N200C |
| 73 | TrCel7A-N200F |
| 74 | TrCel7A-C209S |
| 75 | TrCel7A-S211T |
| 76 | TrCel7A-M213I |
| 77 | TrCel7A-N219S |
| 78 | TrCel7A-I237T |
| 79 | TrCel7A-D241L |
| 80 | TrCel7A-D241R |
| 81 | TrCel7A-D241V |
| 82 | TrCel7A-T246S |
| 83 | TrCel7A-D249C |
| 84 | TrCel7A-D249N |
| 85 | TrCel7A-G253D |
| 86 | TrCel7A-G253R |
| 87 | TrCel7A-G260D |
| 88 | TrCel7A-N264C |
| 89 | TrCel7A-N264Y |
| 90 | TrCel7A-P265T |
| 91 | TrCel7A-T271I |
| 92 | TrCel7A-T281A |
| 93 | TrCel7A-T281I |
| 94 | TrCel7A-K286E |
| 95 | TrCel7A-A299T |
| 96 | TrCel7A-F311L |
| 97 | TrCel7A-P314A |
| 98 | TrCel7A-A316V |
| 99 | TrCel7A-N324D |
| 100 | TrCel7A-E325K |
| 101 | TrCel7A-L326F |
| 102 | TrCel7A-N327Y |
| 103 | TrCel7A-T332I |
| 104 | TrCel7A-G339D |
| 105 | TrCel7A-F343L |
| 106 | TrCel7A-Q351R |
| 107 | TrCel7A-K353M |
| 108 | TrCel7A-T356A |
| 109 | TrCel7A-T356I |
| 110 | TrCel7A-G358S |
| 111 | TrCel7A-M364V |
| 112 | TrCel7A-D368A |
| 113 | TrCel7A-D368G |
| 114 | TrCel7A-Y370H |
| 115 | TrCel7A-A372T |
| 116 | TrCel7A-N373Y |
| 117 | TrCel7A-M374V |
| 118 | TrCel7A-L375A |
| 119 | TrCel7A-D378E |
| 120 | TrCel7A-S379C |
| 121 | TrCel7A-S379E |
| 122 | TrCel7A-P382I |
| 123 | TrCel7A-P382L |
| 124 | TrCel7A-P382Q |
| 125 | TrCel7A-T383A |
| 126 | TrCel7A-T383S |
| 127 | TrCel7A-E385G |
| 128 | TrCel7A-E385I |
| 129 | TrCel7A-E385L |
| 130 | TrCel7A-P390A |
| 131 | TrCel7A-P390C |
| 132 | TrCel7A-P390G |
| 133 | TrCel7A-P390K |
| 134 | TrCel7A-P390L |
| 135 | TrCel7A-P390V |
| 136 | TrCel7A-P390W |
| 137 | TrCel7A-V393A |
| 138 | TrCel7A-S398P |
| 139 | TrCel7A-S400G |
| 140 | TrCel7A-Q406P |
| 141 | TrCel7A-V407I |
| 142 | TrCel7A-S419F |
| 143 | TrCel7A-N420D |
| 144 | TrCel7A-F423Y |
| 145 | TrCel7A-G430D |
| 146 | TrCel7A-N431R |
| 147 | TrCel7A-G435S |
| 148 | TrCel7A-N436D |
| 149 | TrCel7A-P437T |
| 150 | TrCel7A-N441D |
| 151 | TrCel7A-G444D |
| 152 | TrCel7A-T445I |
| 153 | TrCel7A-T446A |
| 154 | TrCel7A-T447S |
| 155 | TrCel7A-R450S |
| 156 | TrCel7A-T453I |
| 157 | TrCel7A-T453S |
| 158 | TrCel7A-T454I |
| 159 | TrCel7A-T455Q |
| 160 | TrCel7A-P459L |
| 161 | TrCel7A-Q463K |
| 162 | TrCel7A-Q463L |
| 163 | TrCel7A-Q463S |
| 164 | TrCel7A-Y466S |
| 165 | TrCel7A-G467D |
| 166 | TrCel7A-G471S |
| 167 | TrCel7A-S475N |
| 168 | TrCel7A-G476D |
| 169 | TrCel7A-S482N |
| 170 | TrCel7A-G483S |
| 171 | TrCel7A-G483V |
| 172 | TrCel7A-C486R |
| 173 | TrCel7A-V488D |
| 174 | TrCel7A-L489P |
| 175 | TrCel7A-L489Q |
| 176 | TrCel7A-P13T-N184S |
| 177 | TrCel7A-T26A-P265T |
| 178 | TrCel7A-T26S-I237T |
| 179 | TrCel7A-N45D-D52R |
| 180 | TrCel7A-N45D-G339D |
| 181 | TrCel7A-N54I-G471S |
| 182 | TrCel7A-N54S-D130E |
| 183 | TrCel7A-I93V-V131A |
| 184 | TrCel7A-K102R-D130N |
| 185 | TrCel7A-L108I-N436D |
| 186 | TrCel7A-M111T-G435S |
| 187 | TrCel7A-P137S-K353M |
| 188 | TrCel7A-V155M-C486R |
| 189 | TrCel7A-I183N-T447S |
| 190 | TrCel7A-Q186K-Q351R |
| 191 | TrCel7A-G253R-Q463S |
| 192 | TrCel7A-G260D-N327Y |
| 193 | TrCel7A-T281A-T454I |
| 194 | TrCel7A-K286E-S379E |
| 195 | TrCel7A-T332I-M364V |
| 196 | TrCel7A-G358S-P390C |
| 197 | TrCel7A-A372T-V393A |
| 198 | TrCel7A-R450S-S482N |
| 199 | TrCel7A-P13H-G358S-M364V |
| 200 | TrCel7A-D114E-D150N-T453S |
| 201 | TrCel7A-S211T-Q463L-V488D |
| 202 | TrCel7A-T281I-T455Q-Q463K |
| 203 | TrCel7A-N373Y-V407I-P459L |
| 204 | TrCel7A-N420D-G444D-L489P |
| 205 | TrCel7A-S46A-E193G-F311L-T383S |
| 206 | TrCel7A-T5I-T26A-E325K-T356I |
| 207 | TrCel7A-C209S-P265T-D378E-T445I |
| 208 | TrCel7A-M213I-Q406P-F423Y-T446A |
| 209 | TrCel7A-A316V-T383A-P437T-G467D |
| 210 | TrCel7A-N441D-T453I-G483S-L489Q |
| 211 | TrCel7A-R39L-N54S-G88V-F129S- |
| | T246S-T271I-N324D-S398P |
| 212 | TrCel7A-G483V-stop498Y |
| 213 | TrCel7A-T59A-S156G-C486stop |
| 214 | TrCel7A-G75S-S400G-C486stop |
| 215 | TrCel7A-P194Q-T478ins |
| 216 | TrCel7A-N197A-Q468stop |
| 217 | TrCel7A-D249N-Q487frame |

[0072] Isolated cellobiohydrolases of the present invention comprising a modified Family 7 catalytic domain and/or a modified Family 1 CBM derived from any of the fungal cellobiohydrolases in Table 1 or Table 2 may be developed by aligning the amino acid sequence of a parental fungal cellobiohydrolase with that of T. reesei Cel7A and identifying the equivalent amino acids in the parental fungal cellobiohydrolase to positions 26, 39, 45, 46, 51, 52, 53, 54, 75, 87, 93, 95, 102, 111, 114, 129, 130, 131, 138, 139, 143, 144, 150, 155, 156, 181, 183, 184, 197, 209, 211, 219, 237, 241, 253, 260, 264, 271, 282, 314, 316, 324, 326, 339, 343, 351, 353, 358, 364, 368, 370, 373, 374, 375, 378, 379, 382, 383, 385, 390, 398, 400, 406, 419, 420, 423, 435, 436, 437, 441, 444, 446, 447, 450, 453, 454, 455, 459, 463, 466, G467, 471, 475, 476, 482, 483, 486, 488, and/or 489 and making the equivalent amino acid substitutions. For example, an isolated cellobiohydrolase may be derived from Myceliophthora thermophila MtCel7A cellobiohydrolase by aligning SEQ ID NO: 2 with SEQ ID NO: 1, as shown in FIG. 4, to identify in SEQ ID NO: 2 the equivalents of positions 26, 39, 45, 46, 51, 52, 53, 54, 75, 87, 93, 95, 102, 111, 114, 129, 130, 131, 138, 139, 143, 144, 150, 155, 156, 181, 183, 184, 197, 209, 211, 219, 237, 241, 253, 260, 264271, 282, 314, 316, 324, 326, 339, 343, 351, 353, 358, 364, 368, 370, 373, 374, 375, 378, 379, 382, 383, 385, 390, 398, 400, 406, 419, 420, 423, 435, 436, 437, 441, 444, 446, 447, 450, 453, 454, 455, 459, 463, 466, 467, 471, 475, 476, 482, 483, 486, 488, and 489 of SEQ ID NO: 1. The result would be an isolated Myceliophthora thermophila MtCel7A cellobiohydrolase comprising one or more amino acid substitution selected from the group consisting of: T26X, R39X, S46X, Y51X, E52X, G53X, N54X, G75X, S87X, L93X, F95X, Y101X, T103X, M112X, D115X, F130X, D131X, V132X, C139X, G140X, A144X, L145X, D151X, S157X, K182X, I184X, N185X, Q194X, N198X, C210X, S212X, N220X, R238X, D242X, A254X, G261X, N265X, K272X, V281X, S318X, S320X, N328X, S329X, I330X, G343X, F348X, Q356X, G358X, G363X, M369X, D373X, N378X, M379X, L380X, D383X, S384X, P387X, I388X, D389X, P394X, T404X, E410X, S423X, N424X, F427X, V434X, G441X, S442X, G443X, N446X, V449X, S451X, V455X, S459X, Y478X, E479X, G483X, T487X, G488X, S494X, C498X, K500X, and L501X and exhibiting from about 75% to about 99.9% amino acid sequence identity to amino acids 1-509 of SEQ ID NO: 2.

[0073] A list of isolated MtCel7A cellobiohydrolase enzymes in accordance with the present invention, which is not to be considered limiting in any manner, is presented in Table 4.

TABLE 4
Isolated Cellobiohydrolases derived from MtCel7A

| SEQ ID NO: | Isolated CBH |
|---|---|
| 218 | MtCel7A-S13H |
| 219 | MtCel7A-S13T |
| 220 | MtCel7A-G22D |
| 221 | MtCel7A-T26A |
| 222 | MtCel7A-T26S |
| 223 | MtCel7A-S27L |
| 224 | MtCel7A-R39L |
| 225 | MtCel7A-S46A |
| 226 | MtCel7A-S46G |
| 227 | MtCel7A-S46L |
| 228 | MtCel7A-S46T |
| 229 | MtCel7A-Y51I |
| 230 | MtCel7A-E52R |
| 231 | MtCel7A-E52T |
| 232 | MtCel7A-E52W |
| 233 | MtCel7A-G53A |
| 234 | MtCel7A-G53M |
| 235 | MtCel7A-G53R |
| 236 | MtCel7A-G53W |
| 237 | MtCel7A-N54D |
| 238 | MtCel7A-N54I |
| 239 | MtCel7A-N54S |
| 240 | MtCel7A-S59A |
| 241 | MtCel7A-G75S |
| 242 | MtCel7A-S87T |
| 243 | MtCel7A-G88V |
| 244 | MtCel7A-L93V |
| 245 | MtCel7A-F95L |
| 246 | MtCel7A-F95Y |
| 247 | MtCel7A-Y101G |
| 248 | MtCel7A-Y101L |
| 249 | MtCel7A-Y101T |
| 250 | MtCel7A-Y101V |
| 251 | MtCel7A-Y101W |
| 252 | MtCel7A-T103R |
| 253 | MtCel7A-T103S |
| 254 | MtCel7A-T109I |
| 255 | MtCel7A-M112T |
| 256 | MtCel7A-D115E |
| 257 | MtCel7A-F130S |
| 258 | MtCel7A-D131E |
| 259 | MtCel7A-D131N |
| 260 | MtCel7A-V132A |
| 261 | MtCel7A-G138S |
| 262 | MtCel7A-C139S |
| 263 | MtCel7A-G140E |
| 264 | MtCel7A-G140M |
| 265 | MtCel7A-G140Q |
| 266 | MtCel7A-G140R |
| 267 | MtCel7A-G140S |
| 268 | MtCel7A-A144G |
| 269 | MtCel7A-A144L |
| 270 | MtCel7A-L145A |
| 271 | MtCel7A-L145V |
| 272 | MtCel7A-D151N |
| 273 | MtCel7A-S157G |
| 274 | MtCel7A-K182L |
| 275 | MtCel7A-I184N |
| 276 | MtCel7A-N185S |
| 277 | MtCel7A-E187K |
| 278 | MtCel7A-Q194G |
| 279 | MtCel7A-S195Q |
| 280 | MtCel7A-N198A |
| 281 | MtCel7A-N198L |
| 282 | MtCel7A-N198Q |
| 283 | MtCel7A-N198V |
| 284 | MtCel7A-N198W |
| 285 | MtCel7A-N201C |
| 286 | MtCel7A-N201F |
| 287 | MtCel7A-C210S |
| 288 | MtCel7A-S212T |
| 289 | MtCel7A-M214I |
| 290 | MtCel7A-N220S |
| 291 | MtCel7A-R238T |
| 292 | MtCel7A-D242L |
| 293 | MtCel7A-D242R |
| 294 | MtCel7A-D242V |
| 295 | MtCel7A-T247S |
| 296 | MtCel7A-T250C |
| 297 | MtCel7A-T250N |
| 298 | MtCel7A-A254D |
| 299 | MtCel7A-A254R |
| 300 | MtCel7A-G261D |
| 301 | MtCel7A-N265C |
| 302 | MtCel7A-N265Y |
| 303 | MtCel7A-S266T |
| 304 | MtCel7A-K272I |
| 305 | MtCel7A-T280A |
| 306 | MtCel7A-T280I |
| 307 | MtCel7A-K285E |
| 308 | MtCel7A-A298T |
| 309 | MtCel7A-I315L |
| 310 | MtCel7A-S318A |
| 311 | MtCel7A-S320V |
| 312 | MtCel7A-N328D |
| 313 | MtCel7A-S329K |
| 314 | MtCel7A-I330F |
| 315 | MtCel7A-T331Y |
| 316 | MtCel7A-D336I |
| 317 | MtCel7A-G343D |
| 318 | MtCel7A-F348L |
| 319 | MtCel7A-Q356R |
| 320 | MtCel7A-G358M |
| 321 | MtCel7A-L361A |
| 322 | MtCel7A-L361I |
| 323 | MtCel7A-G363S |
| 324 | MtCel7A-M369V |
| 325 | MtCel7A-D373A |
| 326 | MtCel7A-D373G |
| 327 | MtCel7A-V377T |
| 328 | MtCel7A-N378Y |
| 329 | MtCel7A-M379V |
| 330 | MtCel7A-L380A |
| 331 | MtCel7A-D383E |
| 332 | MtCel7A-S384C |
| 333 | MtCel7A-S384E |
| 334 | MtCel7A-P387I |
| 335 | MtCel7A-P387L |
| 336 | MtCel7A-P387Q |
| 337 | MtCel7A-I388A |
| 338 | MtCel7A-I388S |
| 339 | MtCel7A-G390I |
| 340 | MtCel7A-G390L |
| 341 | MtCel7A-P394A |
| 342 | MtCel7A-P394C |
| 343 | MtCel7A-P394G |
| 344 | MtCel7A-P394K |
| 345 | MtCel7A-P394L |
| 346 | MtCel7A-P394V |
| 347 | MtCel7A-P394W |
| 348 | MtCel7A-E397A |
| 349 | MtCel7A-T404G |
| 350 | MtCel7A-E410P |
| 351 | MtCel7A-V411I |
| 352 | MtCel7A-S423F |
| 353 | MtCel7A-N424D |
| 354 | MtCel7A-F427Y |
| 355 | MtCel7A-V434D |
| 356 | MtCel7A-S435R |
| 357 | MtCel7A-G441S |
| 358 | MtCel7A-S442D |
| 359 | MtCel7A-G443T |
| 360 | MtCel7A-N446D |
| 361 | MtCel7A-V449D |
| 362 | MtCel7A-S450I |
| 363 | MtCel7A-S451A |
| 364 | MtCel7A-V455S |
| 365 | MtCel7A-S458I |
| 366 | MtCel7A-S459I |
| 367 | MtCel7A-T460Q |
| 368 | MtCel7A-S466L |
| 369 | MtCel7A-A475K |
| 370 | MtCel7A-A475L |
| 371 | MtCel7A-A475S |
| 372 | MtCel7A-Y478S |
| 373 | MtCel7A-E479D |
| 374 | MtCel7A-G483S |
| 375 | MtCel7A-T487N |
| 376 | MtCel7A-G488D |
| 377 | MtCel7A-S494N |
| 378 | MtCel7A-P495S |
| 379 | MtCel7A-P495V |
| 380 | MtCel7A-C498R |
| 381 | MtCel7A-K500D |
| 382 | MtCel7A-L501P |
| 383 | MtCel7A-L501Q |

Isolated Cellobiohydrolases with Improved Activity Against Process Substrates

[0074] The isolated cellobiohydrolase of the present invention, as described above, may exhibit increased specific activity, reduced inhibition by glucose, reduced inactivation by lignin, increased activity in the presence of lignin, increased activity in the presence of lignocellulose hydrolysate, or any combination thereof, relative to a cellobiohydrolase comprising a parental Family 7 catalytic domain from which the modified Family 7 catalytic domain is derived.

[0075] By increased specific activity, it is meant that for a given amount of isolated cellobiohydrolase (comprising a modified Family 7 catalytic domain or comprising a parental or modified Family 7 catalytic domain and a modified Family 1 CBM) acting upon a cellulosic substrate for a given amount of time, more cellulosic substrate is converted to product than would be converted by a corresponding cellobiohydrolase (comprising a parental Family 7 catalytic domain or comprising both a parental Family 7 catalytic domain and a parental Family 1 CBM) under substantially equivalent reaction conditions. The amount of cellobiohydrolase acting upon the cellulosic substrate may be measured in mass or moles of protein per volume of hydrolysis reaction, mass or moles of protein per weight of hydrolysis reaction, mass or moles of protein per mass of cellulose or cellulosic substrate and other measures known to one of skill in the art.

[0076] For the purposes herein, a cellulosic substrate includes, but is not limited to, crystalline or insoluble cellulose, amorphous cellulose (e.g., phosphoric-acid swollen cellulose), cellulose-containing biomass (including, but not limited to, lignocellulosic substrates such as straws, grasses, wood, wood pulp), paper and paper products, cotton and cellulose-containing textiles, soluble cellulose derivatives (e.g., carboxymethyl- or hydroxylethyl-cellulose, a.k.a., CMC and HEC), dyed cellulose (e.g., azo-CMC), as well as low molecular weight cellulose derivatives such as cello-oligosaccharides, fluorogenic substrates such as methyl umbelliferyl-beta-D-cellobioside (MUC) or methyl umbelliferyl-beta-D-lactoside (MUL), or colorimetric substrates such as p-nitrophenyl beta-D-cellobioside (pNP-G2) or p-nitrophenyl beta-D-lactoside (pNP-lac).

[0077] The conversion of cellulosic substrates to products may be determined by any number of methods known to one of skill in the art. For example, hydrolysis of cellulose or cellulose derivatives can be monitored by measuring the enzyme-dependent release of reducing sugars, which are quantified in subsequent chemical or chemienzymatic assays known to one of skill in the art, including reaction with dinitrosalisylic acid (DNS). Hydrolysis of polysaccharides can also be monitored by chromatographic methods that separate and quantify soluble mono-, di- and oligo-saccharides released by the enzyme activity. In addition, soluble colorimetric and low molecular weight cellulose derivatives may be incorporated into agar-medium on which a host microbe expressing and secreting an isolated cellobiohydrolase is grown. In such an agar-plate assay, activity of the cellobiohydrolase is detected as a colored or colorless halo around the individual microbial colony expressing and secreting an active cellulase. The practice of the present invention is not limited by the method used to assess the activity of the isolated cellobiohydrolase.

[0078] By reduced inhibition by glucose, it is meant that for a given amount of isolated cellobiohydrolase (comprising a modified Family 7 catalytic domain or comprising a parental or modified Family 7 catalytic domain and a modified Family 1 CBM) acting upon a cellulosic substrate for a given amount of time in the presence of inhibitory levels of glucose, more cellulosic substrate is converted to products than would be converted by a corresponding cellobiohydrolase (comprising a parental Family 7 catalytic domain or comprising both a parental Family 7 catalytic domain and a parental Family 1 CBM) under substantially identical reaction conditions. Glucose inhibition of cellulases may also be measured by determination of the inhibition constant K_{G}, defined as the concentration of glucose which reduces the activity of the cellulase by 50%. The value of K_{G} is not dependent on the nature of product inhibition—i.e., competitive, non-competitive or mixed-type. Isolated cellobiohydrolases that are less inhibited by glucose will have a higher value for K_{G}—i.e., a higher concentration of glucose is required to reduce the enzyme activity by 50%.

[0079] By reduced inactivation by lignin, it is meant it is meant that for a given amount of isolated cellobiohydrolase (comprising a modified Family 7 catalytic domain or comprising a parental or modified Family 7 catalytic domain and a modified Family 1 CBM) acting upon a cellulosic substrate for a given amount of time after prior exposure to or pre-incubation with lignin, more substrate is converted to products than would be converted by a corresponding cellobiohydrolase (comprising a parental Family 7 catalytic domain or comprising both a parental Family 7 catalytic domain and a parental Family 1 CBM) under substantially identical conditions. For example, the inactivation of a cellobiohydrolase by lignin may be determined by measuring the extent of cellulose conversion, as described above, in equivalent hydrolysis reactions, wherein one of the reactions contains a sufficient amount of lignin to reduce the cellulase activity. Alternatively, purified lignin may be treated to be less inactivating by coating with a non-specific protein such as BSA, a surfactant or other chemical and then added to a reaction of the cellobiohydrolase with a cellulosic substrate in the same amounts as untreated lignin.

[0080] By increased activity in the presence of lignin, it is meant that an isolated cellobiohydrolase (comprising a modified Family 7 catalytic domain or comprising a parental or modified Family 7 catalytic domain and a modified Family 1 CBM) produces more product from a cellulosic substrate in the presence of lignin than does a corresponding cellobiohydrolase (comprising a parental Family 7 catalytic domain or comprising both a parental Family 7 catalytic domain and a parental Family 1 CBM) under substantially equivalent reaction conditions. The increased activity in the presence of lignin of an isolated cellobiohydrolase may be determined by measuring the conversion of cellulosic substrate in the presence and absence of lignin and then taking the ratio of the extent of conversion of cellulosic substrate in the presence of lignin to that in the absence of lignin. The increased activity may result from any one or more of reduced inhibition, inactivation or binding of the isolated cellobiohydrolase by lignin. The practice of the present invention is not limited by the mechanism(s) by which the isolated cellobiohydrolase exhibits increased activity in the presence of lignin.

[0081] The lignin present in such a cellulose hydrolysis reaction can be part of the insoluble substrate, such as in pre-treated lignocellulose, or be purified in a soluble or insoluble form. If the lignin is not part of the cellulosic substrate, such lignin may be treated to be less inactivating by coating with a non-specific protein such as BSA, a surfactant or other chemical and then added to a reaction of the cellobiohydrolase with a cellulosic substrate in the same amounts as untreated lignin. If the lignin is part of the insoluble substrate, one may also measure the ratio of the extent of conversion of an unbleached, lignin-containing cellulosic substrate to that of a bleached substrate (from which the lignin has been removed, for example, by an oxidant such as chlorine dioxide). An isolated cellobiohydrolase (comprising a modified Family 7 catalytic domain or comprising a parental or modified Family 7 catalytic domain and a modified Family 1 CBM) with increased activity in the presence of lignin will show a higher the ratio of the extent of conversion of an unbleached, lignin-containing cellulosic substrate to that of a bleached substrate than a corresponding cellobiohydrolase (comprising a parental Family 7 catalytic domain or comprising both a parental Family 7 catalytic domain and a parental Family 1 CBM).

[0082] One of skill in the art recognizes that isolated cellobiohydrolases with reduced inactivation by lignin or increased activity in the presence of lignin may exhibit reduced binding to lignin. Binding to lignin may be assessed by determine the lignin-binding constant (K_{L}) as described in U.S. Publication No. 2010/0041100. Isolated cellobiohydrolases (comprising a modified Family 7 catalytic domain or comprising a parental or modified Family 7 catalytic domain and a modified Family 1 CBM) exhibiting reduced binding to lignin will have an increased K_{L} relative to that of a corresponding cellobiohydrolase (comprising a parental Family 7 catalytic domain or comprising both a parental Family 7 catalytic domain and a parental Family 1 CBM).

[0083] By increased activity in the presence of lignocellulose hydrolysate it is meant that for a given amount of an isolated cellobiohydrolase (comprising a modified Family 7 catalytic domain or comprising a parental or modified Family 7 catalytic domain and a modified Family 1 CBM) more product is produced from a cellulosic substrate in the presence of lignocellulose hydrolysate than from a corresponding cellobiohydrolase (comprising a parental Family 7 catalytic domain or comprising both a parental Family 7 catalytic domain and a parental Family 1 CBM) under substantially equivalent reaction conditions. Increased activity in the presence of lignocellulose hydrolysate may be determined by measuring the conversion of cellulosic substrate in the presence and absence of the hydrolysate and then taking the ratio of the extent of conversion of cellulosic substrate in the presence of hydrolysate to that in the absence of hydrolysate. By lignocellulose hydrolysate, it is meant a cocktail of one or more of pentose and hexose sugars, lignin monomers, organic acids and sugar break-down produces such as furfural or hydroxymethylfurfural, produced by the chemical or enzymatic treatment of lignocellulosic biomass, by using methods known by one of skill in the art. As such, the increased activity in the presence of lignocellulose hydrolysate may be determined by comparing the extent of conversion of the cellulose in such pretreated lignocellulosic substrate in the presence of hydrolysate (e.g., “unwashed” pretreated substrate or a mixture of washed substrate and hydrolysate) and the absence or hydrolysate (e.g., of a “washed” pretreated substrate).

[0084] The increased activity in the presence of lignocellulose hydrolysate may result from reduced inhibition and/or inactivation of the isolated cellobiohydrolase by lignocellulose hydrolysate. The practice of the present invention is not limited by the mechanism(s) by which the isolated cellobiohydrolase exhibits increased activity in the presence of lignocellulose hydrolysate.

### Genetic Constructs Encoding Isolated Cellobiohydrolases

[0085] The present invention also relates to genetic constructs comprising a polynucleotide sequence encoding an isolated cellobiohydrolase operably linked to regulatory polynucleotide sequences directing the expression and secretion of the isolated cellobiohydrolase from a host microbe. As used herein, “genetic construct” refers to an isolated polynucleotide comprising elements directing the expression of the isolated cellobiohydrolase. These elements may include, but are not limited to, a coding region comprising a polynucleotide sequence that encodes the isolated cellobiohydrolase, a promoter operably linked to the coding region and comprising a polynucleotide sequence that directs the transcription of the coding region, and a sequence encoding a secretion signal peptide and operably linked to the coding region, or targeting polynucleotide sequences that direct homologous recombination of the construct into the genome of the host microbe.

[0086] The terms “secretion signal peptide”, “secretion signal” and “signal peptide” refer to any sequence of nucleotides and/or amino acids which may participate in the secretion of the mature or precursor forms of a secreted protein. The signal sequence may be endogenous or exogenous with respect to the host microbe. The signal sequence may be that normally associated with the protein of interest, from a gene encoding another secreted protein, or be a “hybrid signal sequence” encoded by partial sequences from two or more genes encoding secreted proteins.

[0087] As understood by one of ordinary skill in the art, the promoter and sequence encoding a secretion signal peptide may be derived from the host microbe or from a different organism, and/or be synthesized in vitro. For example, the promoter and sequence encoding a secretion signal peptide may be derived from one or more genes encoding proteins that are highly expressed and secreted when the host microbe, such as gene encoding a cellulase, beta-glucosidase, cellulase-enhancing protein, a hemicellulase or any combination thereof. However, it should be understood that the practice of the present invention is not limited by the choice of promoter or sequence encoding a secretion signal peptide in the genetic constructs. These polynucleotide elements may also be altered or engineered by replacement, substitution, addition, or elimination of one or more nucleic acids relative to a naturally-occurring polynucleotide. The practice of this invention is not constrained by such alterations to elements comprising the genetic construct

[0088] A genetic construct may contain a selectable marker for determining transformation of a host microbe. The selectable marker may be present on the genetic construct or the selectable marker may be a separate isolated polynucleotide that is co-transformed with the genetic construct. Choices of selectable markers are well known to those skilled in the art and include genes (synthetic or natural) that confer to the transformed cells the ability to utilize a metabolite that is not normally metabolized by the microbe (e.g., the A. nidulans amdS gene encoding acetamidase and conferring the ability to grow on acetamide as the sole nitrogen source) or antibiotic resistance (e.g., the Escherichia coli hph gene encoding hygromycin-beta-phosphotransferase and conferring resistance to hygromycin). If the host strain expresses little or none of the chosen marker activity, then the corresponding gene may be used as a marker. Examples of such markers include trp, pyr4, pyrG, argB, leu, and the like. The corresponding host microbe would therefore have to be lacking a functional gene corresponding to the marker chosen, i.e., lacking in the expression of trp, pyr, arg, leu and the like.

[0089] A genetic construct may contain a transcriptional terminator that is functional in the host microbe, as would be known to one of skill in the art. The transcriptional terminator may be positioned immediately downstream of a coding region. The practice of the invention is not constrained by the choice of transcriptional terminator that is sufficient to direct the termination of transcription in the host microbe.

[0090] A genetic construct may contain additional polynucleotide sequences between the various sequence elements as described herein. These sequences, which may be natural or synthetic, may result in the addition of one or more amino acids to the isolated cellobiohydrolase encoded by the construct. The practice of the invention is not constrained by the presence of additional polynucleotide sequences between the various sequence elements of the genetic constructs present in the host microbe.

[0091] Methods of introducing a genetic construct into a host microbe are familiar to those skilled in the art and include, but are not limited to, calcium chloride treatment of microbial cells or fungal protoplasts to weaken the cell membranes, addition of polyethylene glycol to allow for fusion of cell membranes, depolarization of cell membranes by electroporation, or shooting the construct through the cell wall and membranes via microprojectile bombardment with a particle gun. The practice of the present invention is not constrained by the method of introducing the genetic constructs into the fungal cell.

### Genetically Modified Microbes Expressing Isolated Cellobiohydrolases

[0092] The isolated cellobiohydrolase may be expressed and secreted from a genetically modified microbe produced by transformation of a host microbe with a genetic construct encoding the isolated cellobiohydrolase. The host microbe may be a yeast or a filamentous fungus, particularly those classified as Ascomycota. Genera of yeasts useful as host microbes for the expression of isolated cellobiohydrolases of the present invention include Saccharomyces, Pichia, Hansenula, Kluyveromyces, Yarrowia, and Arxula. Genera of fungi useful as microbes for the expression of isolated cellobiohydrolases of the present invention include Trichoderma, Hypocrea, Aspergillus, Fusarium, Humicola, Neurospora, Chrysosporium, Myceliophthora, Thielavia, Sporotrichum and Penicillium. For example, the host microbe may be an industrial strain of Trichoderma reesei or Myceliophthora thermophila.

[0093] The genetic construct may be introduced into the host microbe by any number of methods known by one skilled in the art of microbial transformation, including but not limited to, treatment of cells with CaCl₂, electroporation, biolistic bombardment, PEG-mediated fusion of protoplasts (e.g. White et al., WO 2005/093072, which is incorporated herein by reference). After selecting the recombinant fungal strains expressing the isolated cellobiohydrolase, the selected recombinant strains may be cultured in submerged liquid fermentations under conditions that induce the expression of the isolated cellobiohydrolase.

### Production of Isolated Cellobiohydrolases

[0094] The isolated cellobiohydrolase of the present invention may be produced in a fermentation process in which a genetically modified microbe comprising a genetic construct encoding the isolated cellobiohydrolase is grown in submerged liquid culture fermentation.

[0095] Submerged liquid fermentations of microorganisms, including industrial strains of Trichoderma, Myceliophthora and taxonomically equivalent genera, are typically conducted as a batch, fed-batch or continuous process. In a batch process, all the necessary materials, with the exception of oxygen for aerobic processes, are placed in a reactor at the start of the operation and the fermentation is allowed to proceed until completion, at which point the product is harvested. A batch process for producing the isolated cellobiohydrolase of the present invention may be carried out in a shake-flask or a bioreactor.

[0096] In a fed-batch process, the culture is fed continuously or sequentially with one or more media components without the removal of the culture fluid. In a continuous process, fresh medium is supplied and culture fluid is removed continuously at volumetrically equal rates to maintain the culture at a steady growth rate.

[0097] One of skill in the art is aware that fermentation medium comprises a carbon source, a nitrogen source, and other nutrients, vitamins and minerals which can be added to the fermentation media to improve growth and enzyme production of the host cell. These other media components may be added prior to, simultaneously with or after inoculation of the culture with the host cell.

[0098] For the process for producing the isolated cellobiohydrolase of the present invention, the carbon source may comprise a carbohydrate that will induce the expression of the isolated cellobiohydrolase from a genetic construct in the genetically modified microbe. For example, if the genetically modified microbe is a strain of a cellulolytic fungus such as Trichoderma or Myceliophthora, the carbon source may comprise one or more of cellulose, cellobiose, sophorose, xylan, xylose, xylobiose and related mono-, di-, oligo- or poly-saccharides known to induce expression of cellulases and beta-glucosidase in such cellulolytic fungi.

[0099] In the case of batch fermentation, the carbon source may be added to the fermentation medium prior to or simultaneously with inoculation. In the cases of fed-batch or continuous operations, the carbon source may also be supplied continuously or intermittently during the fermentation process. For example, when the genetically modified microbe is a strain of Trichoderma or Myceliophthora, the carbon feed rate is between 0.2 and 4 g carbon/L of culture/h, or any amount therebetween.

[0100] The process for producing the isolated cellobiohydrolase of the present invention may be carried at a temperature from about 20° C. to about 50° C., or any temperature therebetween, for example from about 25° C. to about 37° C., or any temperature therebetween, or from 20, 22, 25, 26, 27, 28, 29, 30, 32, 35, 37, 40, 45, 50° C. or any temperature therebetween.

[0101] The process for producing the isolated cellobiohydrolase of the present invention may be carried out at a pH from about 3.0 to 8.5, or any pH therebetween, for example from about pH 3.5 to pH 7.0, or any pH therebetween, for example from about pH 3.0, 3.2, 3.4, 3.5, 3.7, 3.8, 4.0, 4.1, 4.2, 4.3, 4.4, 4.5, 4.6, 4.7, 4.8, 4.9, 5.0, 5.2, 5.4, 5.5, 5.7, 5.8, 6.0, 6.2, 6.5, 7.0, 7.5, 8.0, 8.5 or any pH therebetween.

[0102] Following fermentation, the fermentation broth containing the isolated cellobiohydrolase may be used directly, or the isolated cellobiohydrolase may be separated from the fungal cells, for example by filtration or centrifugation. Low molecular solutes such as unconsumed components of the fermentation medium may be removed by ultrafiltration. The isolated cellobiohydrolase may be concentrated, for example, by evaporation, precipitation, sedimentation or filtration. Chemicals such as glycerol, sucrose, sorbitol and the like may be added to stabilize the isolated cellobiohydrolase. Other chemicals, such as sodium benzoate or potassium sorbate, may be added to the isolated cellobiohydrolase to prevent growth of microbial contamination.

[0103] The isolated cellobiohydrolase of the present invention may also be produced by genetically modified microbe comprising a genetic construct encoding the isolated cellobiohydrolase growing on a semi-solid medium, e.g., agar, containing a carbon source that induces the expression of the isolated cellobiohydrolase. For example, the genetically modified microbe may be grown on an agar medium containing a cellulosic substrate, as defined above.

### Cellulase Mixtures Comprising Isolated Cellobiohydrolases

[0104] The isolated cellobiohydrolase may be part of a cellulase mixture. As used herein, a cellulase mixture is a preparation comprising the isolated cellobiohydrolase in combination with one or more cellobiohydrolase, endoglucanase, beta-glucosidase, hemicellulase, cellulase-enhancing protein, lignin-degrading enzyme, esterase, protease, pectinases, pectate lyases, galactanases, amylases, glucoamylases, glucuronidases or galacturonidases. The practice of the present invention is not limited by the composition of the cellulase enzyme mixture.

[0105] The following definitions refer to classification of cellobiohydrolases, endoglucanases, beta-glucosidases, hemicellulases and related proteins as defined by the by the Joint Commission on Biochemical Nomenclature of the International Union of Biochemistry and Molecular Biology (Published in Enzyme Nomenclature 1992, Academic Press, San Diego, Calif., ISBN 0-12-227164-5; with supplements in Eur. J. Biochem. 1994, 223, 1-5; Eur. J. Biochem. 1995, 232, 1-6; Eur. J. Biochem. 1996, 237, 1-5; Eur. J. Biochem. 1997, 250; 1-6, and Eur. J. Biochem. 1999, 264, 610-650, each of which are incorporated herein by reference; also see: chem.qmul.ac.uk/iubmb/enzyme/) and to the glycoside hydrolase (GH) families as defined by the CAZy system which is accepted as a standard nomenclature for glycohydrolase enzymes (Coutinho, P. M. & Henrissat, B., 1999, “Carbon-active enzymes: an integrated database approach.” In Recent Advances in Carbon Bioengineering, H. J. Gilbert, G. Davies, B. Henrissat and B. Svensson eds., The Royal Society of Chemistry, Cambridge, pp. 3-12, which is incorporated herein by reference; also see: afmb.cnrs-mrs.fr/CAZY/) and is familiar to those skilled in the art.

[0106] The term cellulase (or cellulase enzymes) broadly refers to enzymes that catalyze the hydrolysis of the β-1,4-glucosidic bonds joining individual glucose units in the cellulose polymer. The catalytic mechanism involves the synergistic actions of endoglucanases (E.C. 3.2.1.4) and cellobiohydrolases (E.C. 3.2.1.91). Endoglucanases hydrolyze accessible glycosidic bonds in the middle of the cellulose chain, while cellobiohydrolases release cellobiose from these chain ends processively. Cellobiohydrolases are also referred to as exoglucanases. Most cellulases have a similar modular structure, which consists of one or more catalytic domain and one or more carbohydrate-binding modules (CBM) joined by flexible linker peptides. Most cellulases comprise at least one catalytic domain of GH Family 5, 6, 7, 8, 9, 12, 44, 45, 48, 51, 61 and 74.

[0107] A cellulase-enhancing protein is a protein that enhances the rate or extent of cellulose hydrolysis by cellulase enzymes but does not exhibit significant cellulose-degrading activity on its own. Cellulase-enhancing proteins include, but are not limited to, proteins classified in GH Family 61, swollenins and expansins.

[0108] A hemicellulase or hemicellulose degrading enzyme is an enzyme capable of hydrolysing the glycosidic bonds in a hemicellulose polymer. Hemicellulases include, but are not limited to, xylanase (E. C. 3.2.1.8), beta-mannanase (E.C. 3.2.1.78), alpha-arabinofuranosidase (E.C. 3.2.1.55), beta-xylosidases (E.C. 3.2.1.37), and beta-mannosidase (E.C. 3.2.1.25). Hemicellulases typically comprise a catalytic domain of Glycoside Hydrolase Family 5, 8, 10, 11, 26, 43, 51, 54, 62 or 113.

[0109] Beta-glucosidases (E.C. 3.2.1.21) hydrolyze cellobiose to glucose. Beta-glucosidases typically comprise catalytic domains of GH Family 1 or 3 but usually do not comprise a CBM.

[0110] Lignin degrading enzymes are enzymes that oxidize and participate in the depolymerisation of lignin and include, for example, laccases (E.C. 1.10.3.2), lignin peroxidases (E.C. 1.11.1.14), manganese peroxidases (E.C. 1.11.1.13) and cellobiose dehydrogenases (E.C. 1.1.99.18).

[0111] A cellulase enzyme mixture of the present invention may also include one or more esterases, including but not limited to acetyl xylan esterases (E.C. 3.1.1.72) and ferulic acid esterases (E.C. 3.1.1.73). The cellulase enzyme mixture may also include one or more additional enzyme activities such as pectinases, pectate lyases, galactanases, amylases, glucoamylases, glucuronidases and galacturonidases.

[0112] The practice of the fermentation process of the present invention is not limited by the particular composition of the cellulase enzyme mixture. However, depending on the intended use of the cellulase enzyme mixture produced, it may be desirable that the isolated cellobiohydrolase of the present invention comprise from about 10 wt % to about 100 wt %, for example about 10, 20, 30, 40, 50, 60, 70, 80, 90 or 100 wt %, or any wt % therebetween, of the protein present in the cellulase enzyme mixture.

[0113] In one embodiment of the invention, the isolated cellobiohydrolase is one of many proteins expressed from a host cell, including, but not limited to the cellulase mixture described above. The isolated cellobiohydrolase and other protein(s) in the cellulase enzyme mixtures may be secreted from a single genetically modified microbe or by different microbes in combined or separate fermentations. Similarly, the isolated cellobiohydrolase and other protein(s) in the cellulase enzyme mixture may be expressed individually or in sub-groups from different strains of different organisms and the enzymes combined to make the cellulase enzyme mixture. It is also contemplated that isolated cellobiohydrolase and other protein(s) in the cellulase enzyme mixture may be expressed individually or in sub-groups from different strains of a single organism, such as from different strains of Saccharomyces, Pichia, Hansenula, Trichoderma, Hypocrea, Aspergillus, Fusarium, Humicola, Chrysosporium, Myceliophthora, Thielavia, Sporotrichum, Talaromyces, Neurospora, or Penicillium, and the enzymes combined to make the cellulase enzyme mixture. Preferably, all of the enzymes are expressed from a single host organism, such as a strain of cellulolytic fungus belonging to a species of Trichoderma, Hypocrea, Aspergillus, Fusarium, Humicola, Chrysosporium, Myceliophthora, Thielavia, Sporotrichum, Talaromyces, Neurospora or Penicillium.

### Hydrolysis of Cellulosic Substrates Using Isolated Cellobiohydrolases

[0114] The isolated cellobiohydrolase of the present invention may be used in the hydrolysis of a cellulosic substrate. By the term “cellulosic substrate”, it is meant any substrate derived from plant biomass and comprising cellulose, including, but not limited to, crystalline or insoluble cellulose, amorphous cellulose (e.g., phosphoric-acid swollen cellulose), pre-treated lignocellulosic feedstocks for the production of ethanol or other high value products, animal feeds, food products, forestry products, such as pulp, paper and wood chips, textiles products. amorphous cellulose (e.g., phosphoric-acid swollen cellulose), soluble cellulose derivatives (e.g., carboxymethyl- or hydroxylethyl-cellulose, a.k.a., CMC and HEC), dyed cellulose (e.g., azo-CMC), as well as low molecular weight cellulose derivatives such as cello-oligosaccharides, fluorogenic substrates such as methyl umbelliferyl-beta-D-cellobioside (MUC) or methyl umbelliferyl-beta-D-lactoside (MUL), or colorimetric substrates such as p-nitrophenyl beta-D-cellobioside (pNP-G2) or p-nitrophenyl beta-D-lactoside (pNP-lac).

[0115] In one embodiment, the isolated cellobiohydrolase may be used, alone or as part of a cellulase mixture, to produce fermentable sugars from a pretreated lignocellulosic feedstock

[0116] A pretreated lignocellulosic feedstock, or pretreated lignocellulose, is a material of plant origin that, prior to pretreatment, contains 20-90% cellulose (dry wt), more preferably about 30-90% cellulose (dry wt), even more preferably 40-90% cellulose (dry wt), for example 20, 22, 24, 26, 28, 30, 32, 34, 36, 38, 40, 42, 44, 46, 48, 50, 55, 60, 65, 70, 75, 80, 85, 90% (dry wt), or any % (dry wt), therebetween, and at least 10% lignin (dry wt), more typically at least 12% (dry wt) and that has been subjected to physical, chemical or biological processes to make the fiber more accessible and/or receptive to the actions of cellulolytic enzymes.

[0117] One method of performing acid pretreatment of the feedstock is steam explosion using the process conditions set out in U.S. Pat. No. 4,461,648. Another method of pretreating the feedstock slurry involves continuous pretreatment, meaning that the lignocellulosic feedstock is pumped though a reactor continuously. Continuous acid pretreatment is familiar to those skilled in the art; see, for example, U.S. Pat. No. 5,536,325; WO 2006/128304; and U.S. Pat. No. 4,237,226. Additional techniques known in the art may be used as required such as the process disclosed in U.S. Pat. No. 4,556,430.

[0118] The pretreatment may also be conducted with alkali. In contrast to acid pretreatment, pretreatment with alkali does not hydrolyze the hemicellulose component of the feedstock, but rather the alkali reacts with acidic groups present on the hemicellulose to open up the surface of the substrate. The addition of alkali may also alter the crystal structure of the cellulose so that it is more amenable to hydrolysis. Examples of alkali that may be used in the pretreatment include ammonia, ammonium hydroxide, potassium hydroxide, and sodium hydroxide. An example of a suitable alkali pretreatment is Ammonia Freeze Explosion, Ammonia Fiber Explosion or Ammonia Fiber Expansion (“AFEX” process) as described in U.S. Pat. Nos. 5,171,592; 5,037,663; 4,600,590; 6,106,888; 4,356,196; 5,939,544; 6,176,176; 5,037,663 and 5,171,592. The pretreatment is preferably not conducted with alkali that is insoluble in water, such as lime and magnesium hydroxide.

[0119] Yet a further non-limiting example of a pretreatment process for use in the present invention includes chemical treatment of the feedstock with organic solvents. Organic liquids in pretreatment systems are described by Converse et al. (U.S. Pat. No. 4,556,430; incorporated herein by reference), and such methods have the advantage that the low boiling point liquids easily can be recovered and reused. Other pretreatments, such as the Organosolv™ process, also use organic liquids (see U.S. Pat. No. 7,465,791, which is also incorporated herein by reference). Subjecting the feedstock to pressurized water may also be a suitable pretreatment method (see Weil et al. (1997) Appl. Biochem. Biotechnol. 68(1-2): 21-40, which is incorporated herein by reference).

[0120] The pretreated lignocellulosic feedstock may be processed after pretreatment by any of several steps, such as dilution with water, washing with water, buffering, filtration, or centrifugation, or a combination of these processes, prior to enzymatic hydrolysis, as is familiar to those skilled in the art. The pH of the pretreated feedstock slurry may be adjusted to a value that is amenable to the cellulase enzymes, which is typically between about 4 and about 8.

[0121] The pretreated lignocellulose is subjected to enzymatic hydrolysis with a cellulase enzyme mixture comprising the isolated cellobiohydrolase. By the term “enzymatic hydrolysis”, it is meant a process by which cellulases and another glycosidase enzymes or mixtures act on polysaccharides, such as cellulose and hemicellulose, to convert all or a portion thereof to soluble sugars such as glucose, cellobiose, cellodextrins, xylose, arabinose, galactose, mannose or mixtures thereof. The soluble sugars may be predominantly cellobiose and glucose.

[0122] The enzymatic hydrolysis is carried out at a pH and temperature that is at or near the optimum for the cellulase enzymes mixture. For example, the enzymatic hydrolysis may be carried out at about 30° C. to about 75° C., or any temperature therebetween, for example a temperature of 30, 35, 40, 45, 50, 55, 60, 65, 70, 75° C., or any temperature therebetween, and a pH of about 3.5 to about 8.0, or any pH therebetween, for example a pH of 3.5, 4.0, 4.5, 5.0, 5.5, 6.0, 6.5, 7.0, 7.5, 8.0 or any pH therebetween.

[0123] The initial concentration of cellulose, prior to the start of enzymatic hydrolysis of the pretreated lignocellulose, is preferably about 0.01% (w/w) to about 20% (w/w), or any amount therebetween, for example 0.01, 0.05, 0.1, 0.5, 1, 2, 4, 6, 8, 10, 12, 14, 15, 18, 20% (w/w) or any amount therebetween. The combined dosage of all cellulase enzymes may be about 0.001 to about 100 mg protein per gram cellulose, or any amount therebetween, for example 0.001, 0.01, 0.1, 1, 5, 10, 15, 20, 25, 30, 40, 50, 60, 70, 80, 90, 100 mg protein per gram cellulose or any amount therebetween.

[0124] The enzymatic hydrolysis of the pretreated lignocellulose may be carried out for a time period of about 0.5 hours to about 200 hours, or any time therebetween, for example, the hydrolysis may be carried out for a period of 2 hours to 100 hours, or any time therebetween, or it may be carried out for 0.5, 1, 2, 5, 7, 10, 12, 14, 15, 20, 25, 30, 35, 40, 45, 50, 55, 60, 65, 70, 75, 80, 85, 90, 95, 100, 120, 140, 160, 180, 200 hours or any time therebetween.

[0125] It should be appreciated that the reaction conditions are not meant to limit the invention in any manner and may be adjusted as desired by those of skill in the art.

[0126] The enzymatic hydrolysis of the pretreated lignocellulose may be batch hydrolysis, continuous hydrolysis, or a combination thereof. The hydrolysis may be agitated, unmixed, or a combination thereof. The enzymatic hydrolysis is typically carried out in a hydrolysis reactor. The cellulase enzyme may be added to the pretreated lignocellulosic substrate prior to, during, or after the addition of the substrate to the hydrolysis reactor.

[0127] The above description is not intended to limit the claimed invention in any manner. Furthermore, the discussed combination of features might not be absolutely necessary for the inventive solution.

### EXAMPLES

[0128] The present invention will be further illustrated in the following examples. However, it is to be understood that these examples are for illustrative purposes only and should not be used to limit the scope of the present invention in any manner.

[0129] Example 1 describes the strains and vectors used in the following examples. Example 2 describes the cloning of the TrCel7A gene and the preparation of site-saturation mutagenesis libraries of TrCel7A. Example 3 describes the preparation of random mutagenesis libraries of TrCel7A. Example 4 describes the transformation of T. reesei host strains with genetic constructs expressing isolated cellobiohydrolases in. Example 5 describes the expression of wild-type and isolated TrCel7A cellobiohydrolases from microcultures. Example 6 describes the sequencing of polynucleotides encoding isolated cellobiohydrolases. Examples 7 through 12 describe the high-throughput screening assays to identify isolated cellobiohydrolases with improved activity on process substrates.

### Example 1

### Strains and Vectors

[0130] Escherichia coli strain DH5α (F-φ80lacZΔM15 Δ(lacZYA-argF)U169 recA1 endA1 hsdR17(rk−, mk+) phoA supE44 thi-1 gyrA96 relA1 λ−) was obtained from Invitrogen (cat. No. 18265-017 and/or 18258-012). Trichoderma reesei strain P297J, a proprietary strain of Iogen Corporation, is a derivative of T. reesei strain BTR213 from which the genes encoding TrCel7A, TrCel6A and TrCel7B have been deleted (U.S. Publication No. 2010-0221778). Strain BTR213 is a proprietary strain of Iogen Corporation derived from T. reesei strain RutC30 (ATCC® number 56765™). A uridine auxotroph of P297J, P297Jaux4, was obtained through selection of mutants spontaneously resistant to 0.15% w/v 5-fluoroorotic-acid (FOA).

[0131] Plasmid pJET1.2 vector was obtained from Fermentas as a part of the CloneJET™ PCR Cloning Kit (cat. No. K1232). The Trichoderma reesei transformation vectors used to express TrCel7A, TrCel7A-R449E-R450E, and isolated TrCel7A cellobiohydrolases derived therefrom, were either pTr7Ap-NheI-KpnI-7aT-DRmUra3 or pTr7Ap′-NheI-KpnI-7aT-DRmUra3 (FIGS. 1 and 2, respectively). Both promote transcription of polynucleotides encoding isolated cellobiohydrolases using trcel7a promoter and terminator. Plasmid pTr7Ap-NheI-KpnI-7aT-DRmUra3 contains the wild-type trcel7a promoter; plasmid pTr7Ap′-NheI-KpnI-7aT-DRmUra3 contains four repeats of the last 18 base pairs of the promoter at the 3′ end. These vectors also contains NheI and KpnI sites for cloning of polynucleotides encoding isolated cellobiohydrolases, direct repeats to promote integration targeted at the native trcel7a locus, and the T. reesei ura3 gene to allow growth of transformants on uracil-depleted media.

### Example 2

### Site-Saturation Mutagenesis (SSM) of TrCel7A

[0132] a. SSM PCR

[0133] Site-saturation mutagenesis (SSM) libraries of TrCel7A were generated with primers containing a degenerate codon (NNS) targeting various amino acid positions. SSM was performed using a two-step PCR method involving Megaprimer synthesis followed by PCR-mediated overlap extension. PCR reactions were carried out using iProof™ High-Fidelity DNA Polymerase (Bio-Rad). A vector containing genomic DNA encoding TrCel7A with flanking sequences (SEQ ID NO: 384) was used as the template for the L375X library. A vector containing genomic DNA encoding TrCel7A-R449E-R450Ewith flanking sequences (SEQ ID NO: 385) served as the template for all other SSM libraries.

[0134] For each SSM library, MegaPrimer A was amplified using the external forward primer AC639 with an internal mutagenic reverse primer, while MegaPrimer B was derived by combining the external reverse primer AC640 with an internal mutagenic forward primer. The mutagenic primers contained a degenerate codon sequence to introduce random amino acid substitutions at the targeted sites. All primer sequences are listed in Table 5. The MegaPrimers A and B were subjected to agarose gel electrophoresis and purified from the gel using the Wizard SV® Gel and PCR Clean-Up system (Promega). In the second round of PCR, both MegaPrimers for a given SSM library were allowed to anneal and extend for 5 to 10 cycles to generate the final template. The external primers AC639 and AC640 were then added for another 25 cycles to amplify the final product. The final SSM PCR amplicons were subjected to agarose gel electrophoresis and the ˜1.7 kb TrCel7A amplicons were purified from the gel using the Wizard SV® Gel and PCR Clean-Up system (Promega).

TABLE 5
List of primers used to generate the TrCe17A SSM libraries.

| Target | | | | SEQ |
|---|---|---|---|---|
| Amino | | Primer | | ID |
| Acid | Orientation | name | Sequence (5′ to 3′)¹ | NO: |
| N/A | Forward | AC639 | GCGGACTGCGCATCGCTAGCATGTATCGGAAGTTGG | 386 |
| (external | | | CCGTC | |
| primers) | Reverse | AC640 | TTCGCCACGGAGCTGGTACCTTACAGGCACTGAGAG | 387 |
| | | | TAGTAAG | |
| S46 | Reverse | NM201 | GTTCGTAGCGTGAGTCCAG | 388 |
| | Forward | NM202 | CTGGACTCACGCTACGAACNNSAGCACGAACTGCTA | 389 |
| | | | CGATG | |
| D52 | Reverse | NM203 | GTAGCAGTTCGTGCTGCTGTTCG | 390 |
| | Forward | NM204 | CGAACAGCAGCACGAACTGCTACNNSGGCAACACTT | 391 |
| | | | GGAGCTCGACCC | |
| G53 | Reverse | NM205 | ATCGTAGCAGTTCGTGCTGCTGTTC | 392 |
| | Forward | NM206 | GAACAGCAGCACGAACTGCTACGATNNSAACACTTG | 393 |
| | | | GAGCTCGACC | |
| F95 | Reverse | NM211 | GCCAATGGAGAGGCTG | 394 |
| | Forward | NM212 | CAGCCTCTCCATTGGCNNSGTCACCCAGTCTGCGCAG | 395 |
| | | | AAGAAC | |
| A100 | Reverse | NM213 | AGACTGGGTGACAAAGCCAATG | 396 |
| | Forward | NM214 | CATTGGCTTTGTCACCCAGTCTNNSCAGAAGAACGTT | 397 |
| | | | GGCGCTC | |
| K102 | Reverse | NM215 | CTGCGCAGACTGGGTGACAAAG | 398 |
| | Forward | NM216 | CTTTGTCACCCAGTCTGCGCAGNNSAACGTTGGCGCT | 399 |
| | | | CGCCTTTACC | |
| G139 | Reverse | NM219 | GCACCTTGAATTGGCCAG | 400 |
| | Forward | NM220 | CTGGCCAATTCAAGGTGCNNSTTGAACGGAGCTCTC | 401 |
| | | | TAC | |
| A143 | Reverse | NM221 | TCCGTTCAAGCCGCACCTTG | 402 |
| | Forward | NM222 | CAAGGTGCGGCTTGAACGGANNSCTCTACTTCGTGT | 403 |
| | | | CCATGGACGC | |
| L144 | Reverse | NM223 | AGCTCCGTTCAAGCCGC | 404 |
| | Forward | NM224 | GCGGCTTGAACGGAGCTNNSTACTTCGTGTCCATGG | 405 |
| | | | ACGCGG | |
| K181 | Reverse | NM229 | CAGATCGCGGGGACACTG | 406 |
| | Forward | NM230 | CAGTGTCCCCGCGATCTGNNSTTCATCAATGGCCAG | 407 |
| | | | GCCAAC | |
| N197 | Reverse | NM231 | GGATGACGGCTCCCAG | 408 |
| | Forward | NM232 | CTGGGAGCCGTCATCCNNSAACGCGAACACGGGCAT | 409 |
| | | | TG | |
| N200 | Reverse | NM233 | CGCGTTGTTGGATGACG | 410 |
| | Forward | NM234 | CGTCATCCAACAACGCGNNSACGGGCATTGGAGGAC | 411 |
| | | | AC | |
| N219 | Reverse | NM237 | GGCCTCCCAGATATCC | 412 |
| | Forward | NM238 | GGATATCTGGGAGGCCNNSTCCATCTCCGAGGCTCTT | 413 |
| | | | AC | |
| D241 | Reverse | NM239 | ACCCTCGCAGATCTCCTGG | 414 |
| | Forward | NM240 | CCAGGAGATCTGCGAGGGTNNSGGGTGCGGCGGAAC | 415 |
| | | | TTAC | |
| D249 | Reverse | NM241 | GGAGTAAGTTCCGCCGCACCC | 416 |
| | Forward | NM242 | GGGTGCGGCGGAACTTACTCCNNSAACAGATATGGC | 417 |
| | | | GGCACTTG | |
| G253 | Reverse | NM243 | ATATCTGTTATCGGAGTAAGTTC | 418 |
| | Forward | NM244 | GAACTTACTCCGATAACAGATATNNSGGCACTTGCG | 419 |
| | | | ATCCCGATG | |
| G260 | Reverse | NM277 | ATCGGGATCGCAAGTGCC | 420 |
| | Forward | NM278 | GGCACTTGCGATCCCGATCCSTGCGACTGGAACCCATAC | 421 |
| N264 | Reverse | NM247 | CCAGTCGCAGCCATCG | 422 |
| | Forward | NM248 | CGATGGCTGCGACTGGNNSCCATACCGCCTGGGCAA | 423 |
| | | | CACCAG | |
| N327 | Reverse | NM279 | GAGCTCGTTGCCAGAGTAAC | 424 |
| | Forward | NM280 | GTTACTCTGGCAACGAGCTCNNSGATGATTACTGCA | 425 |
| | | | CAGCTGAGG | |
| F343 | Reverse | NM253 | AGAGGATCCGCCGAATTCTG | 426 |
| | Forward | NM254 | CAGAATTCGGCGGATCCTCTNNSTCAGACAAGGGCG | 427 |
| | | | GCCTGAC | |
| D368 | Reverse | NM257 | CCACAGACTCATGACCAG | 428 |
| | Forward | NM258 | CTGGTCATGAGTCTGTGGNNSGATGTGAGTTTGATG | 429 |
| | | | GAC | |
| M374 | Reverse | NM261 | GTTGGCGTAGTACTGTAAC | 430 |
| | Forward | NM262 | GTTACAGTACTACGCCAACNNSCTGTGGCTGGACTC | 431 |
| | | | CACC | |
| L375 | Reverse | KAP065 | CATGTTGGCGTAGTACTG | 432 |
| | Forward | KAP064 | CAGTACTACGCCAACATGNNSTGGCTGGACTCCACCTAC | 433 |
| S379 | Reverse | NM265 | GTCCAGCCACAGCATGTTG | 434 |
| | Forward | NM266 | CAACATGCTGTGGCTGGACNNSACCTACCCGACAAA | 435 |
| | | | CGAG | |
| P382 | Reverse | NM267 | GTAGGTGGAGTCCAGCCACAG | 436 |
| | Forward | NM268 | CTGTGGCTGGACTCCACCTACNNSACAAACGAGACC | 437 |
| | | | TCCTCC | |
| E385 | Reverse | NM269 | GTTTGTCGGGTAGGTGGAG | 438 |
| | Forward | NM270 | CTCCACCTACCCGACAAACNNSACCTCCTCCACACCC | 439 |
| | | | GGTGC | |
| P390 | Reverse | NM271 | TGTGGAGGAGGTCTCGTTTG | 440 |
| | Forward | NM272 | CAAACGAGACCTCCTCCACANNSGGTGCCGTGCGCG | 441 |
| | | | GAAG | |

¹In the degenerate codon, the N stands for A, T, C or G whereas S stands for C or G.

b. In Vitro Recombination and Amplification of the Libraries in Escherichia coli

[0135] The vector used for cloning of the L375X library was pTr7Ap′-NheI-KpnI-7aT-DRmUra3 (FIG. 2) whereas the vector used for all other SSM libraries was pTr7Ap-NheI-KpnI-7aT-DRmUra3 (FIG. 1). Both vectors were digested with NheI and KpnI and treated with Antarctic phosphatase (New England Biolabs). The digested vectors were subjected to agarose gel electrophoresis and the ˜8.1 kb linearized vector fragment was purified from the gel using the Wizard SV® Gel and PCR Clean-Up system (Promega).

[0136] The DNA concentration of the linearized vectors and each SSM PCR amplicon were determined using the Quant-iT™ PicoGreen® dsDNA Reagent Kit (Invitrogen) following the manufacturer's protocol. The external primers (AC639 and AC640) contain sequences which are homologous to the free ends of the linearized receiving vector. This homology allows for cloning of the SSM PCR amplicons into the receiving vector by in vitro recombination. The linear vector fragment and each SSM PCR amplicon were cloned by in vitro recombination using In-Fusion™ recombinase (Clontech) following manufacturer's recommendations. The recombinase reactions were used to transform 100 μL of DH5α™ MAX® Efficiency competent cells (Invitrogen) following the manufacturer's recommendations. The cells from each library transformation were plated on two 15 cm selective agar media plates and allowed to grow overnight at 37° C.

[0137] The resulting colonies from each library were scraped from the transformation plates. The protocol for harvesting the cells was adapted from Current Protocols in Molecular Biology Unit 5.8A: Production of a complete cDNA library, pg. 5.8.4 (Klickstein, L. B., 2001). Specifically, Luria Bertani broth (5 mL) was added to each 15 cm agar plate and allowed to sit at room temperature for 5 minutes. The colonies were gently scraped from the surface of the agar using a sterile plastic cell scraper (Costar). The cells from both plates of the library were pooled together. Glycerol stocks (15% final concentration) of the cell suspension were made for future amplification of the library if needed. The plasmid DNA was extracted from the remaining cell suspension using the Wizard® Plus SV Minipreps DNA Purification System (Promega) and used for subsequent transformation of T. reesei host strain P297Jaux (Example 4).

### Example 3

### Random Mutagenesis of TrCel7A

[0138] a. Error-Prone PCR

[0139] Random mutagenesis libraries were generated by error-prone PCR using Mutazyme® II DNA polymerase (Agilent). Two error-prone PCR were performed. One reaction used 20 fmol of a vector containing a polynucleotide encoding TrCel7A-R449E-R450E and flanking sequences (SEQ ID NO: 442). Another error-prone PCR was performed using 100 fmol of a vector containing a polynucleotide encoding TrCel7A and flanking sequences (SEQ ID NO: 443). Both reactions contained the Mutazyme® II DNA polymerase with primers AC639 and AC640. The annealing temperature was set to 60° C. and the amplification was done for 20 cycles. The error-prone PCR amplicons were subjected to agarose gel electrophoresis and the ˜1.6 kb amplicons were purified from the gel using the Wizard SV® Gel and PCR Clean-Up system (Promega). Primer sequences are shown below:

AC639:
(SEQ ID NO: 386)
5′ GCGGACTGCGCATCGCTAGCATGTATCGGAAGTTGGCCGTC
AC640:
(SEQ ID NO: 387)
5′ TTCGCCACGGAGCTGGTACCTTACAGGCACTGAGAGTAGTAAG

[0140] b. In Vitro Recombination and Amplification of the Libraries in Escherichia coli

[0141] The pTrCel7Ap-NheI KpnI-DRmUra3 (FIG. 2) vector was digested with NheI and KpnI and treated with Antarctic Phosphatase (New England Biolabs). The digested vector was subjected to agarose gel electrophoresis and the ˜8.1 kb linearized vector fragment was purified from the gel using the Wizard SV® Gel and PCR Clean-Up system (Promega). The DNA concentration of the linearized vector and the error-prone PCR amplicon was determined using the Quant-iT™ PicoGreen® dsDNA Reagent Kit (Invitrogen) following the manufacturer's protocol. The external primers (AC639 and AC640) contain sequence which is homologous to the free ends of the linearized receiving vector. This homology allows for cloning of the error-prone PCR amplicons into the receiving vector by in vitro recombination. The linear vector fragment and the library of error-prone PCR amplicons were cloned by in vitro recombination using In-Fusion™ recombinase (Clontech) following manufacturer's recommendations.

[0142] The recombinase reactions were used to transform 500 μL of DH5α™ MAX®Efficiency competent cells (Invitrogen) following the manufacturer's recommendations. The cells from the library transformation were plated on ten 15 cm selective agar media plates and allowed to grow overnight at 37° C.

[0143] The resulting colonies from the library were scraped from the transformation plates. The protocol for harvesting the cells was adapted from Current Protocols in Molecular Biology Unit 5.8A (Ausubel, et al., Eds., John Wiley & Sons, p. 5.8.4). Specifically, Luria Bertani broth (5 mL) was added to each 15 cm agar plate and allowed to sit at room temperature for 5 minutes. The colonies were gently scraped from the surface of the agar using a sterile plastic cell scraper (Costar). The cells from all ten plates of the library were pooled together. Glycerol stocks (15% final concentration) of the cell suspension were made for future amplification of the library if needed. The plasmid DNA was extracted from the remaining cell suspension using the Wizard® Plus SV Midipreps DNA Purification System (Promega) and used for subsequent transformation of T. reesei host strain P297Jaux (Example 4).

### Example 4

### Expression of Isolated Cellobiohydrolases in T. reesei Host Strain

[0144] a. Biolistic Transformation

[0145] The transformations of strain P297Jaux with TrCel7A library expression vectors prepared as in Examples 2 and 3 were performed by biolistic gold particle bombardment using PDS-1000/He system with Hepta adapter (BioRad; E.I. DuPont de Nemours and Company). Gold particles (median diameter of 0.6 um, BioRad Cat. No. 1652262) were used as microcarriers. Prior to transformation, T. reesei strain P297Jaux was grown on potato dextrose agar (PDA) (Difco) plates for 4-5 days at 30° C. until sporulated. Spores were collected and suspended in sterile water. Approximately 3.5×10⁸ spores were plated on 100 mm diameter plates containing minimal media (MM). The following parameters were used for the transformation: a rupture pressure of 1350 psi, a helium pressure of 28 mm Hg, target distance 3 cm. After particle delivery, spores from each transformation plate were washed with 2.5 mL of sterile 0.9% NaCl, spread on 3-4 150 mm plates containing MM and incubated at 30° C. for 5-10 days. All transformants were transferred to PDA media and incubated at 30° C. until sporulation and further screen-out on ASC plates.

### Minimal Medium (MM) Agar:

| | Amount for 1 L | |
|---|---|---|
| Component | of medium | |
| KH₂PO₄ | 10 | g |
| (NH₄)₂SO₄ | 6 | g |
| Na₃Citrate-2H₂O | 3 | g |
| FeSO₄—7H₂O | 5 | mg |
| MnSO₄—H₂O | 1.6 | mg |
| ZnSO₄—7H₂O | 1.4 | mg |
| CaCl₂—2H₂O | 2 | mg |
| Agar | 20 | g |
| 20% Glucose f.s.¹ | 50 | mL |
| 1M MgSO4—7H₂O f.s.¹ | 4 | mL |

pH to 5.5
¹f.s.—filter sterilized

[0147] b. Screen-Out of Transformants Expressing Inactive Cellobiohydrolases

[0148] Phosphoric acid swollen cellulose (ASC) was prepared as follows: 400 g of SIGMACel T50 was wetted with 60 0 mL of acetone and mixed thoroughly with a paddle mixer in a 20 L bucket. The bucket content was then cooled in an ice water bath. A total of 4 L of commercial grade phosphoric acid (85%) was slowly added to the wetted cellulose and constantly stirred. Precooled deionized water was added to the acid/cellulose gelatinous mixture resulting in precipitation of a white clumpy material. A solution of 5-7% bicarbonate was added to begin neutralizing the slurry. The solution was slowly added to the slurry with constant mixing. Once the slurry pH was 5-7, it was filtered through GF/A filter paper by vacuum filtration. The moist white cellulose preparation was washed with greater than 4L of deionized water to ensure salts, and soluble sugars were removed from the resulting amorphous cellulose. Typical solids content of the cellulose after acid treatment was 7-9%.

[0149] For screen-out of transformants expressing inactive TrCel7A cellobiohydrolases, the ASC was treated with an endoglucanase enriched enzyme as follows. 64.7 g of ASC was combined with 25 mL of 250 mM citrate buffer pH 5.0. Water was added to make up the slurry to 120 mL. The slurry was contained in a 250 mL screw-capped Erlenmeyer flask. About 170-180 mg of total protein comprising a cellulase preparation from Trichoderma reesei strain deficient in TrCel7A and TrCel6A cellulase components was added to the slurry in a volume no greater than 10 mL. The dose of endoglucanase enriched enzyme was 40 mg of protein/g of cellulose (dry wt). Flasks were incubated overnight at 50° C. for 16 h with shaking at 200 rpm followed by homogenization using the Powergen 1000 homogenizer from Fisher Scientific. Enzyme-treated ASC was then diluted with an equal volume of water and pH adjusted to 4.5-4.6 before blending for 1 minute in a standard kitchen blender followed by sterilizing in an autoclave at standard temperatures and pressures. At this point the concentration of ASC is 25 g/L.

[0150] Assessment of TrCel7Aactivity in Trichoderma transformants expressing isolated TrCel7A cellobiohydrolases was performed by germinating spores of transformants on ASC Screen-Out Medium (Table 6). Sterilized media (200 mL) was poured into a 245 mm×245 mm×1.5 mm square plastic bioassay plate. Transformants expressing isolated TrCel7A cellobiohydrolase, wild-type TrCel7A or TrCel7A-R449E-R450E were spotted on the medium and plates were incubated at 30° C. for 6 days, followed by 1 day incubation at 50° C. TrCel7A activity was assessed by formation of clearing zone around transformant colonies.

TABLE 6
Composition of ASC Screen Out Medium

| | Amount per liter | |
|---|---|---|
| Component | of medium | |
| 5X Minimal Media Salts* | 40 | mL |
| Proteose Peptone#3 (Difco) | 0.2 | g |
| Bovine Oxgall (Difco) | 1.8 | g |
| Agar | 4 | g |
| Deionized water | 80 | mL |
| Phosphoric Acid Swollen | 80 | mL |
| Cellulose (25 g/L) | | |
| 1M MgSO₄—7H₂O | 4 | mL |

*5X Minimal Media Salts Composition (per L of medium): 50 g KH₂PO_{4,} 30 g NH₄(SO₄), 15 g Na₃-Citrate-2H₂O, 25 mg FeSO₄—7H₂O, 8 mg MnSO₄—H₂O, 7 mg ZnSO₄—7H₂O, 10 mg CaCl₂—2H₂O

### Example 5

### Production of Isolated TrCel7A Cellobiohydrolases in Microcultures

[0151] T. reesei strains were grown on Potato Dextrose Agar at 28-30° C. until a confluent lawn of spores was obtained. Spores were collected and used to inoculate 0.7 mL of expression medium having the following initial composition: 100 mM DL-malic acid pH 3.5, 12.7 g/L (NH₄)₂SO₄, 8.0 g/L KH₂PO₄, 4.0 g/L MgSO₄*7H₂O, 1.02 g/L CaCl₂, 5.0 g/L dry corn steep, 10 mg/L FeSO₄*7H₂O, 3.2 mg/L MnSO₄*H₂O, 2.8 g/L ZnSO₄*7H₂O. The cultures were grown at 28-30° C. using an inducing carbohydrate source in 96-well deep plates agitated at 45-60 rpm on a RolloDrum (New Brunswick Scientific, Edison, N.J.) tilted at a 60-80° angle. After 5-6 days, the culture was centrifuged and the supernatant used for analyses.

[0152] For larger-scale analyses, spores of each variant were collected and used to inoculate 12 wells of a 24-well deep plate, each well containing 4 mL of expression medium described above. The culture were grown at 28-30° C. using an inducing carbohydrate source and agitated on a one inch orbit shaker at 225-275 rpm. After 5-6 days, the culture was centrifuged and the supernatant from each of the 12 wells was pooled and analyzed.

[0153] The concentration of TrCel7A in the microculture filtrates was determined by ELISA. Culture supernatants and purified component standards were diluted to 0.01-10 μg/mL in phosphate-buffered saline (PBS; pH 7.2) and incubated overnight at 4° C. in microtitre plates (Costar EIA #9018). These plates were washed with PBS containing 0.1% Tween-20 (PBS/Tween) and then incubated in PBS containing 1% bovine serum albumin (PBS/BSA) for 1 h at room temperature. Blocked microtitre wells were washed with PBS/Tween. Rabbit polyclonal antisera specific for TrCel7A was diluted in PBS/BSA, added to separate microtitre plates and incubated for 2 h at room temperature. Plates were washed and incubated with a goat anti-rabbit antibody coupled to horseradish peroxidase (Sigma Cat. No. A6154), diluted 1:2000 in PBS/BSA, for 1 h at room temperature. After washing, tetramethylbenzidine (Sigma Cat. No. T0440) was added to each plate and incubated for 30 min at room temperature. The absorbance at 660 nm was measured in each well and converted into protein concentration using a TrCel7A standard curve.

### Example 6

### Sequencing Trichoderma reesei Library Clones

[0154] To isolate T. reesei genomic DNA, 1 mL of Potato Dextrose Broth (Difco) was inoculated with T. reesei spores collected from a Potato Dextrose Agar plate (or from a glycerol stock) with a sterile pipette tip. The cultures were grown for 20 to 24 h at 30° C. The mycelia were pelleted by centrifugation at 20,000×g for 5 minutes.

[0155] The genomic DNA was extracted using the Wizard Genomic DNA Extraction Kit (Promega) following a modified protocol. Nuclei Lysis Solution (included in the kit) and 400-650 μm glass beads were added to the pelleted mycelia. The mycelia were then physically lysed using a vortex or the FastPrep® homogenizer at max speed (6.5 meters per sec) for 1 min. The genomic DNA was then purified following the manufacturer's protocol 3.E: Isolating gDNA from plant tissue. The concentration of DNA was determined by measuring the absorbance of the solution at 260 nm (Sambrook et al., 1989, Molecular Cloning: A Laboratory Manual, Second Edition”, Cold Spring Harbor Press, p. C1).

[0156] The extracted genomic DNA was used as a template for PCR amplification of TrCel7A from the T. reesei genome. The reverse primer KAP070 was designed to be specific to the vector backbone of the library, to be sure that the amplified TrCel7A gene was in fact the inserted copy from the library and not the endogenous genetic material from the T. reesei genome. The primers KAP070 and KAP072 were used along with iProof™ High-Fidelity DNA Polymerase (Bio-Rad) in the PCR mixture. Primer sequences are shown below:

KAP070:
(SEQ ID NO: 444)
5′ AAGCCGATGTCACACGCG
KAP072:
(SEQ ID NO: 445)
5′ CAGATCCTCCAGGAGACTTG

[0157] The amplicons (˜2.2 kb for TrCel7A cDNA or ˜2.3 kb for TrCel7A with both introns) were subjected to agarose gel electrophoresis and were purified from the gel using the Wizard SV® Gel and PCR Clean-Up system (Promega). The concentration of DNA was determined by measuring the absorbance of the solution at 260 nm (p. C1 in Sambrook et al., 1989, which is incorporated herein by reference).

[0158] The purified amplicons were either sent directly for sequencing, or blunt-end cloned into the pJET1.2 vector using the CloneJET™ kit (Fermentas) following manufacturer's recommendations, or subjected to a second round of amplification prior to be sent for sequencing. The pJET1.2-TrCel7A constructs were transformed into Subcloning Efficiency™ DH5α™ competent cells (Invitrogen) following the manufacturer's recommendations. The plasmid DNA was mini prepped from either a single transformant or a mixture of transformants, and this plasmid DNA was sent for sequence analysis by an outside sequencing facility (Genome Quebec).

### Example 7

### Screening for Isolated Cellobiohydrolases with Improved Specific Activity on Cellulose

[0159] Isolated TrCel7A cellobiohydrolases from T. reesei microcultures (Example 5) were tested in a 0.20 mL citrate buffered (pH 5) cellulose hydrolysis assay using a 96-well microplate format. An aliquot of supernatant from each microculture was added to each well containing 0.15% w/v cellulose and incubated for 20 h at 50° C. T. reesei supernatants were complemented with Trichoderma reesei TrCel7B and TrCe15A endoglucanases (40 mg protein/g cellulose each) and 125 IU/g cellulose A. niger beta-glucosidase. Contained in each 96-well microplate were 6 corresponding parent controls for comparison. Cellulase activity was measured by a decrease in turbidity (OD 600). Specific activity was determined by dividing the cellulase activity by the concentration of TrCel7A (as determined by ELISA; Example 5). The specific activity for each isolated TrCel7A cellobiohydrolase was compared to the average of the 6 corresponding parent controls of a particular microplate. A standard deviation was determined for the 6 parent controls and isolated TrCel7A cellobiohydrolases exhibiting a specific activity of at least 2.5 standard deviations from the control were selected as positive. All positives were produced again in microculture, re-screened and polynucleotides encoding isolated cellobiohydrolases exhibiting improved specific activity on cellulose were sequenced as in Example 6.

TABLE 7
Isolated Cellobiohydrolases with Improved Specific Activity on Cellulose

| Parent | Amino Acid Substitution(s) | Improvement |
|---|---|---|
| SEQ ID NO: 1 | P137S; K353M | +++ |
| SEQ ID NO: 1 | T5I; T26A; E325K; T356I | +++ |
| SEQ ID NO: 446 | P390A | ++ |
| SEQ ID NO: 446 | N200F | ++ |
| SEQ ID NO: 446 | P390W | ++ |
| SEQ ID NO: 446 | G358S; P390C | + |
| SEQ ID NO: 446 | P390K | + |
| SEQ ID NO: 446 | D241L | + |
| SEQ ID NO: 446 | P390G | + |
| SEQ ID NO: 446 | P382L | + |
| SEQ ID NO: 446 | F95L | + |
| SEQ ID NO: 446 | N219S | + |
| SEQ ID NO: 446 | E385G | + |
| SEQ ID NO: 446 | G253D | + |
| SEQ ID NO: 446 | E385I | + |
| SEQ ID NO: 1 | T332I; M364V | + |

Improvement: +++ >10 sd from parental average; ++ >4 sd from parental average; and + >2 sd from parental average (sd, standard deviation)

### Example 8

### Screening for Isolated Cellobiohydrolases with Improved Specific Activity on Lignocellulose

[0160] Wheat straw was pretreated using the methods described in U.S. Pat. No. 4,461,648. Following pretreatment, sodium benzoate was added at a concentration of 0.5% as a preservative. Prior to use, the pretreated material was then washed with six volumes of lukewarm (˜35° C.) tap water using a Buchner funnel and filter paper.

[0161] Isolated TrCel7A cellobiohydrolases from T. reesei microcultures (Example 5) were tested in a 0.21 mL citrate buffered (pH 5) wheat straw hydrolysis assay using a 96-well microplate format. An aliquot of supernatant from each microculture was added to a well containing wheat straw (0.9% w/v cellulose) and incubated for 18 h at 50° C. T. reesei supernatants were complemented with Trichoderma reesei TrCel7B and TrCe15A endoglucanases (40 mg protein/g cellulose each) and 125 IU/g cellulose A. niger beta-glucosidase. Contained in each 96-well microplate were 6 corresponding parent controls for comparison. Microplates were centrifuged for 3 min at 2800×g and an aliquot of supernatant was sampled for glucose content. Enzyme activity was measured via the detection of glucose using a standard glucose oxidase/peroxidase coupled reaction assay (Trinder, P. (1969) Annals of Clinical Biochemistry, 6:24-27). Specific activity was determined by dividing the enzyme activity by the concentration of TrCel7A (as determined by ELISA; Example 5). The specific activity for each isolated TrCel7A cellobiohydrolase was compared to the average of the 6 corresponding parent controls on a particular microplate. A standard deviation was determined for the 6 corresponding parent controls and isolated TrCel7A cellobiohydrolases exhibiting a specific activity of at least 2.5 standard deviations from the control were selected as positive. All positives were produced again in microculture, re-screened and polynucleotides encoding isolated cellobiohydrolases exhibiting improved specific activity on lignocellulose were sequenced as in Example 6.

TABLE 8
Isolated Cellobiohydrolases with Improved Specific Activity
on Lignocellulose

| Parent | Amino Acid Substitution(s) | Improvement* |
|---|---|---|
| SEQ ID NO: 446 | N45D; D52R | +++ |
| SEQ ID NO: 446 | S46T | +++ |
| SEQ ID NO: 446 | S46G | +++ |
| SEQ ID NO: 446 | P390G | +++ |
| SEQ ID NO: 446 | Q27L | ++ |
| SEQ ID NO: 446 | D241L | ++ |
| SEQ ID NO: 446 | P390L | ++ |
| SEQ ID NO: 446 | G53A | ++ |
| SEQ ID NO: 446 | D241R | ++ |
| SEQ ID NO: 446 | S46L | ++ |
| SEQ ID NO: 446 | N197L | ++ |
| SEQ ID NO: 446 | D368A | + |
| SEQ ID NO: 446 | E385L | + |
| SEQ ID NO: 446 | N200F | + |
| WT TrCel7A | Q186K; Q351R | + |
| SEQ ID NO: 1 | A372T; V393A | + |

*Improvement: +++ >10 sd from parental average; ++ >5 sd from parental average; and + >2 sd from parental average (sd, standard deviation)

### Example 9

### Screening Isolated Cellobiohydrolases with Reduced Inhibition by Glucose

[0162] Isolated TrCel7A cellobiohydrolases from T. reesei microcultures (Example 5) were tested in a 0.20 mL citrate buffered (pH 5) cellulose hydrolysis assay using a 96-well microplate format. An aliquot of supernatant from each microculture was added to a well containing 60 g/L glucose and to a well containing no glucose, and incubated with 0.15% w/v cellulose for 20 h at 50° C. T. reesei supernatants were complemented with Trichoderma reesei TrCel7B and TrCe15A endoglucanases (40 mg protein/g cellulose each) and 125 IU/g cellulose A. niger beta-glucosidase. Contained in each 96-well microplate were 6 corresponding parent controls for comparison. Cellulase activity was measured by a decrease in turbidity (OD 600). A ±glucose activity ratio was calculated for all isolated TrCel7A cellobiohydrolases and the 6 corresponding parent controls by dividing the cellulase activity in the presence of glucose by the cellulase activity in the absence of glucose. The ±glucose activity ratio for each isolated TrCel7A cellobiohydrolase was compared to the average of the 6 corresponding parent controls on a particular microplate. A standard deviation was determined for the 6 corresponding parent controls and isolated TrCel7A cellobiohydrolases exhibiting a ±glucose activity ratio at least 2 standard deviations above that of the control were selected as positive. All positives were produced again in microculture, re-screened and polynucleotides encoding isolated cellobiohydrolases exhibiting reduced inhibition by glucose were sequenced as in Example 6.

TABLE 9
Isolated TrCel7A cellobiohydrolases with Reduced Inhibition by Glucose

| Parent | Amino Acid Substitution(s) | Improvement* |
|---|---|---|
| SEQ ID NO: 446 | G53A | +++ |
| SEQ ID NO: 446 | D52T | +++ |
| SEQ ID NO: 446 | D52W | +++ |
| SEQ ID NO: 446 | D241R | +++ |
| SEQ ID NO: 446 | G139Q | +++ |
| SEQ ID NO: 446 | G53R | ++ |
| SEQ ID NO: 446 | D241V | ++ |
| SEQ ID NO: 446 | L144V | ++ |
| SEQ ID NO: 446 | A143L | ++ |
| SEQ ID NO: 446 | S379C | ++ |
| SEQ ID NO: 1 | S46I; E193G; F311L; T383S | ++ |
| SEQ ID NO: 1 | T356A | ++ |
| SEQ ID NO: 1 | R39L; N54S; G88V; F129S; T246S; | ++ |
| | T271I; N324D; S298P | |
| SEQ ID NO: 1 | P13T; N184S | ++ |
| SEQ ID NO: 1 | T26S; I237T | ++ |
| SEQ ID NO: 1 | P13H; G358S; M364V | ++ |
| SEQ ID NO: 446 | K286E; S379E | + |
| SEQ ID NO: 446 | S46T | + |
| SEQ ID NO: 446 | D52R | + |
| SEQ ID NO: 446 | G139M | + |
| SEQ ID NO: 446 | A100W | + |
| SEQ ID NO: 446 | G53M | + |
| SEQ ID NO: 446 | A100V | + |
| SEQ ID NO: 446 | N264Y | + |
| SEQ ID NO: 446 | G139S | + |
| SEQ ID NO: 446 | G139E | + |
| SEQ ID NO: 1 | L375A | + |
| SEQ ID NO: 1 | T26A; P265T | + |
| SEQ ID NO: 446 | L144A | + |
| SEQ ID NO: 1 | G22D | + |
| SEQ ID NO: 446 | A100T | + |
| SEQ ID NO: 1 | S419F | + |
| SEQ ID NO: 446 | N264C | + |
| SEQ ID NO: 446 | G53W | + |
| SEQ ID NO: 446 | P390L | + |
| SEQ ID NO: 446 | D249C | + |
| SEQ ID NO: 1 | P314A | + |
| SEQ ID NO: 446 | Q27L | + |
| SEQ ID NO: 1 | S87T | + |
| SEQ ID NO: 1 | G430D | + |
| SEQ ID NO: 446 | P382Q | + |
| SEQ ID NO: 1 | T281A; T454I | + |
| SEQ ID NO: 446 | P382L | + |
| SEQ ID NO: 1 | M213I; Q406P; F423Y; T446A | + |
| SEQ ID NO: 1 | L326F | + |
| SEQ ID NO: 446 | P390G | + |
| SEQ ID NO: 1 | N45D; G339D | + |
| SEQ ID NO: 1 | I183N; T447S | + |
| SEQ ID NO: 446 | S431R | + |
| SEQ ID NO: 446 | F343L | + |
| SEQ ID NO: 1 | S475N | + |

*Improvement: +++ >4 sd from parental average; ++ >3 sd from parental average; and + >2 sd from parental average (sd, standard deviation)

### Example 10

### Screening for Isolated Cellobiohydrolases with Increased Activity in the Presence of Lignocellulose Hydrolysate

[0163] Unwashed pretreated wheat straw (prepared as in U.S. Publication No. 2010-0056774) was treated with a high dose of cellulase (75 mg/g) and incubated for 96 h at the optimal temperature for cellulase activity. The reaction was then boiled to inactivate enzyme and passed through a glass fiber filter to remove residual solids. The remaining filtrate is referred to herein as hydrolysate.

[0164] Isolated TrCel7A cellobiohydrolases from T. reesei microcultures (Example 5) were tested in a 0.25 mL citrate buffered (pH 5) cellulose hydrolysis assay using a 96-well microplate format. An aliquot of supernatant from each microculture was added to a well containing 100 μL hydrolysate (+hydrolysate) or 100 μL water (-hydrolysate), and incubated with 0.15% w/v cellulose for 20 h at 50° C. T. reesei supernatants were complemented with Trichoderma reesei TrCel7B and TrCe15A endoglucanases (40 mg protein/g cellulose each) and 125 IU/g cellulose A. niger beta-glucosidase. Contained in each 96-well microplate were 6 corresponding parent controls for comparison. Cellulase activity was measured by a decrease in turbidity (OD 600). A ±hydrolysate activity ratio was calculated for all isolated TrCel7A cellobiohydrolases and the 6 corresponding parent controls by dividing the cellulase activity in the presence of hydrolysate by the cellulase activity in the absence of hydrolysate. The ±hydrolysate activity ratio for each isolated TrCel7A cellobiohydrolase was compared to the average of the 6 corresponding parent controls on a particular microplate. A standard deviation was determined for the 6 corresponding parent controls and isolated cellobiohydrolases exhibiting a ±hydrolysate activity ratio at least 2 standard deviations above that of the control were selected as positive. All positives were produced again in microculture, re-screened and polynucleotides encoding isolated cellobiohydrolases exhibiting increased activity in the presence of lignocellulose hydrolysate were sequenced as in Example 6.

TABLE 10
Isolated Cellobiohydrolases with Increased Activity in the Presence of
Lignocellulose Hydrolysate

| Parent | Amino Acid Substitution(s) | Improvement* |
|---|---|---|
| SEQ ID NO: 1 | D114E; D150N; T453S | ++ |
| SEQ ID NO: 1 | M111T; G435S | + |
| SEQ ID NO: 1 | I93V; V131A | + |
| SEQ ID NO: 1 | C209S; P265T; D378E; T445I | + |

*Improvement*: = ++ >3 sd from average parent; and + >2 sd from average parent (sd, standard deviation).

### Example 11

### Screening for Isolated Cellobiohydrolases with Reduced Inactivation by Lignin

[0165] a. Preparation of Lignin

[0166] Wheat straw was pretreated using the methods described in U.S. Pat. No. 4,461,648. Following pretreatment, sodium benzoate was added at a concentration of 0.5% as a preservative. Prior to lignin extraction, the pretreated material was then washed with six volumes of lukewarm (−35° C.) tap water using a Buchner funnel and filter paper.

[0167] Lignin was acid extracted from pretreated wheat straw (333 g wet; ˜30% solids; ˜60% cellulose) by stirring in 625 mL of 82% H₂SO₄ for 4 h. The remaining solids were filtered to dampness using a Buchner funnel and a glass fibre filter, resuspended in 2 L of water, and pH adjusted to 4.5 with NaOH. The solids were filtered and washed with 8 L water. The solids are referred to herein as “lignin”.

[0168] Bovine serum albumin (BSA) treatment of lignin was performed by incubating equal amounts (w/w) of lignin and BSA (30 g/L, 50 mM citrate buffer, pH 5, 0.1% sodium benzoate) for 5 days at 50° C. with shaking.

[0169] b. High-Throughput Screening of Isolated Cellobiohydrolases

[0170] T. reesei microculture filtrates (Example 5) were diluted 5-fold in water and distributed as 0.15 mL aliquots for pre-incubation in a 0.25 mL citrate-buffered (50 mM; pH 5) reaction containing lignin (0.4% w/v) or BSA-treated lignin (0.4% w/v). Pre-incubations were performed for 2 h at 50° C. with orbital shaking (NB Innova 44) in a 96-well microplate containing 1 glass bead. Each 96-well microplate contained six corresponding parent cellobiohydrolase controls for comparison. Following pre-incubation, microplates were centrifuged for 5 min at 2800×g and the supernatant was aspirated for residual activity assays. Supernatant was diluted 10-fold in water prior to performing activity measurements.

[0171] Diluted supernatant (0.05 mL) was incubated with 0.25 mM 4-methylumbelliferyl-beta-D-lactoside (MUL) in a 100 μL citrate buffered (50 mM; pH 5) reaction for 15 minutes at 50° C. in a black Costar 3915 microplate. A 4-methylumbelliferone (4-MU) standard curve was prepared in the first column ranging from 5 to 0.08 μM. Reactions were stopped by adding 100 μL of 0.2 M glycine (pH 10) to all the wells. Fluorescence emission was measured at 445 nm following excitation at 370 nm. Residual enzyme activity was determined by converting the fluorescence units to the amount of 4-MU released. Activity ratios were calculated by dividing the residual enzyme activity in the presence of untreated lignin by the residual enzyme activity in the presence of BSA-treated lignin. The activity ratio for each isolated cellobiohydrolase was compared to the average of that of the six corresponding parent controls on a particular microplate. Positives (those having increased ratios) were selected at the 95% confidence level using a t-test. All positives were produced again in microculture, re-screened and polynucleotides encoding isolated cellobiohydrolases exhibiting reduced inactivation by lignin were sequenced as in Example 6.

TABLE 11
Isolated Cellobiohydrolases with Reduced Inactivation by Lignin

| Parent | Amino Acid Substitution(s)* | Normalized ratio |
|---|---|---|
| SEQ ID NO: 1 | T59A; S156G; C486stop | 2.18 |
| SEQ ID NO: 1 | T281I; T455A; Q463K | 2.05 |
| SEQ ID NO: 1 | Y466S | 1.97 |
| SEQ ID NO: 1 | G75S; S400G; C486stop | 1.96 |
| SEQ ID NO: 1 | G483V; S498stop | 1.93 |
| SEQ ID NO: 1 | D249N; Q487frame | 1.89 |
| SEQ ID NO: 1 | N54I; G471S | 1.88 |
| SEQ ID NO: 1 | N420D; G444D; L489P | 1.82 |
| SEQ ID NO: 446 | A100G | 1.70 |
| SEQ ID NO: 446 | N197A; Q468stop | 1.66 |
| SEQ ID NO: 1 | C138S | 1.65 |
| SEQ ID NO: 1 | G476D | 1.65 |
| SEQ ID NO: 1 | P194Q; T478ins | 1.65 |
| SEQ ID NO: 1 | V155M; C486R | 1.60 |
| SEQ ID NO: 1 | A316V; T383A; P437T; G467D | 1.60 |
| SEQ ID NO: 446 | P390V | 1.55 |
| SEQ ID NO: 446 | K102R; D130N | 1.53 |
| SEQ ID NO: 446 | P382I | 1.52 |
| SEQ ID NO: 446 | N200C | 1.50 |
| SEQ ID NO: 1 | N441D; T453I; G483S; L489Q | 1.50 |
| SEQ ID NO: 1 | L108I; N436D | 1.47 |
| SEQ ID NO: 1 | S211T; Q463L; V488D | 1.47 |
| SEQ ID NO: 1 | R450S; S482N | 1.37 |
| SEQ ID NO: 446 | K102S | 1.34 |
| SEQ ID NO: 446 | N200F | 1.34 |
| SEQ ID NO: 446 | G253RQ463S | 1.33 |
| SEQ ID NO: 446 | K181L | 1.28 |

*“frame” indicates introduction of a frameshift starting at the indicated amino acid position; “stop” indicates introduction of a stop codon at the indicated amino acid position

### Example 12

### Screening for Isolated Cellobiohydrolases with Increased Activity in the Presence of Lignin

[0172] The ratio of specific activity on pretreated wheat straw (“WS activity” as described in Example 8) to the specific activity on cellulose (“cellulose activity” as described in Example 7) was calculated for each isolated cellobiohydrolase and the corresponding parent cellobiohydrolase controls. The WS activity:cellulose activity ratio for isolated cellobiohydrolase and was compared to the average WS activity:cellulose activity ratio of its 6 corresponding parent cellobiohydrolase controls on a particular microplate. A standard deviation was determined for the 6 corresponding parent cellobiohydrolase controls and isolated cellobiohydrolases exhibiting a WS activity:cellulose activity ratio of at least 2.5 standard deviations above that of the 6 corresponding parent cellobiohydrolase controls were selected as positive. All positives were produced again in microculture, re-screened and polynucleotides encoding isolated cellobiohydrolases exhibiting increased activity in the presence of lignin were sequenced as in Example 6.

TABLE 12
Isolated Cellobiohydrolases with Increased Activity in the
Presence of Lignin

| Parent | Amino Acid Substitution(s) | Improvement |
|---|---|---|
| SEQ ID NO: 446 | A143G | +++ |
| SEQ ID NO: 446 | A197Q | +++ |
| SEQ ID NO: 1 | A372T; V393A | +++ |
| SEQ ID NO: 446 | A197W | +++ |
| SEQ ID NO: 1 | Y370H | ++ |
| SEQ ID NO: 446 | D368G | ++ |
| SEQ ID NO: 446 | F95Y | + |
| SEQ ID NO: 446 | D368A | + |
| SEQ ID NO: 1 | A299T | + |
| SEQ ID NO: 446 | M374V | + |

*Improvement: +++ >4 sd from average parent; ++ >3 sd from average parent; and + >2 sd from average parent (sd, standard deviation).

The embodiments of the invention in which an exclusive property or privilege is claimed are defined as follows:

1. An isolated cellobiohydrolase enzyme comprising a modified Family 7 catalytic domain with one or more amino acid substitution at position 26, 39, 45, 46, 51, 52, 53, 54, 75, 87, 93, 95, 102, 111, 114, 129, 130, 131, 138, 139, 143, 144, 150, 155, 156, 181, 183, 184, 197, 209, 211, 219, 237, 241, 253, 260, 264, 271, 282, 314, 316, 324, 326, 339, 343, 351, 353, 358, 364, 368, 370, 373, 374, 375, 378, 379, 382, 383, 385, 390, 398, 400, 406, 419, 420, 423, 435, 436, or any combination thereof; said position determined from alignment of a corresponding parental Family 7 catalytic domain with amino acids 1-436 of SEQ ID NO: 1 or with amino acids 1-438 of SEQ ID NO: 2, wherein the modified Family 7 catalytic domain exhibits from about 45% to about 99.9% amino acid sequence identity to amino acids 1-436 of SEQ ID NO: 1 or to amino acids 1-438 of SEQ ID NO: 2, and wherein the isolated cellobiohydrolase enzyme exhibits
a. increased specific activity,
b. reduced inhibition by glucose,
c. reduced inactivation by lignin,
d. increased activity in the presence of lignin,
e. increased activity in the presence of lignocellulose hydrolysate, or
f. any combination of a through e,
relative to a cellobiohydrolase comprising a parental Family 7 catalytic domain from which the modified Family 7 catalytic domain is derived.

2. The isolated cellobiohydrolase enzyme of claim 1, comprising a modified Family 7 catalytic domain with one or more amino acid substitution at position 26, 39, 45, 46, 52, 53, 54, 87, 95, 102, 129, 130, 139, 143, 144, 183, 184, 197, 237, 241, 253, 264, 271, 282, 314, 316, 324, 326, 339, 343, 364, 368, 379, 382, 385, 390, 398, 406, 423, or any combination thereof.

3. The isolated cellobiohydrolase of claim 1, wherein the modified Family 7 catalytic domain comprises one or more amino acid substitution selected from the group consisting of: X26A, X45D, X46A, X46L, X46T, X51I, X52R, X52W, X53A, X53M, X53R, X53W, X54S, X54I, X54D, X75S, X87T, X93V, X95L, X95Y, X102R, X111T, X129S, X130N, X130E, X138S, X139E, X139M, X139Q, X139S, X139R, X143L, X143G, X144A, X144V, X150N, X181L, X183N, X184S, X197L, X197V, X197Q, X197W, X219S, X237T, X241L, X241R, X241V, X253R, X260D, X264C, X264Y, X271I, X326F, X343L, X351R, X353M, X364V, X368A, X373Y, X374V, X375A, X378E, X379C, X379E, X382L, X382Q, X382I, X383S, X385I, X385L, X390A, X390G, X390K, X390W, X390C, X390L, X390V, X400G, X406P, X419F, and X436D, wherein the modified Family 7 catalytic domain comprises an amino acid sequence that is from about 65% to about 99.9% identical to amino acids 1-436 of SEQ ID NO: 1 or to amino acids 1-438 of SEQ ID NO: 2.

4. The isolated cellobiohydrolase of claim 3, wherein the modified Family 7 catalytic domain comprises one or more amino acid substitution selected from the group consisting of: X45D, X46A, X46L, X46T, X52R, X53A, X53M, X53R, X53W, X54S, X54I, X54D, X87T, X95L, X95Y, X102R, X129S, X130N, X139M, X139S, X139R, X143L, X143G, X144V, X183N, X184S, X197L, X197V, X197Q, X197W, X237T, X241L, X241R, X241V, X253R, X264C, X271I, X282I, X314A, X326F, X343L, X364V, X368A, X368G, X379C, X379E, X382L, X382Q, X382I, X383S, X385G, X385I, X385L, X390A, X390G, X390K, X390W, X390C, X390L, X390V, X398P, X406P, and X423Y, and exhibits from about 80% to about 99.9% identy to amino acids 1-436 of SEQ ID NO: 1 or to amino acids 1-438 of SEQ ID NO: 2.

5. The isolated cellobiohydrolase claim 1, further comprising a carbohydrate binding module and a linker peptide positioned between the modified Family 7 catalytic domain and the carbohydrate binding module.

6. The isolated cellobiohydrolase of claim 5, wherein the carbohydrate binding module is a Family 1 carbohydrate binding module exhibiting from about 50% to about 99% identity to amino acids 461 to 497 of SEQ ID NO: 1 or to amino acids 474 to 509 of SEQ ID NO: 2 and comprising one or more amino acid substitutions selected from the group consisting of X466S, X467D, X471S, X483V, X483S, X486R, X489T, and X489Q, said position determined from alignment of a parental Family 1 carbohydrate binding module with amino acids 461 to 497 of SEQ ID NO: 1.

7. An isolated cellobiohydrolase comprising a Family 7 catalytic domain, a modified Family 1 carbohydrate binding module, and a linker peptide between the Family 7 catalytic domain and the modified Family 1 carbohydrate binding module, wherein the modified Family 1 carbohydrate binding module exhibits from about 50% to about 99% identity to amino acids 461 to 497 of SEQ ID NO: 1 or to amino acids 474 to 509 of SEQ ID NO: 2 and comprises one or more amino acid substitutions selected from the group consisting of X466S, X467D, X471S, X483V, X483S, X486R, X489T, and X489Q, said position determined from alignment of a parental Family 1 carbohydrate binding module with amino acids 461 to 497 of SEQ ID NO: 1, and wherein the isolated cellobiohydrolase exhibits
a. increased specific activity,
b. reduced inhibition by glucose,
c. reduced inactivation by lignin,
d. increased activity in the presence of lignin,
e. increased activity in the presence of lignocellulose hydrolysate, or
f. any combination of a through e,
relative to a cellobiohydrolase comprising a parental Family 1 carbohydrate binding module from which the modified Family 1 carbohydrate binding module is derived.

8. An isolated Trichoderma reesei TrCel7A cellobiohydrolase comprising one or more amino acid substitution selected from the group consisting of: T26X, R39L, N45D, S46X, Y51I, D52X, G53X, N54X, G75X, S87X, I93X, F95X, A100X, K102X, L108X, M111X, D114X, F129X, D130X, V131X, P137X, C138X, G139X, A143X, L144X, D150X, V155X, 5156X, K181X, I183X, N184X, P194X, N197X, N200X, C209X, S211X, N219X, I237X, D241X, G253X, G260X, N264X, T271X, L282X, P314X, A316X, N324X, L326X, G339X, F343X, Q351X, K353X, G358X, M364X, D368X, Y370X, A372X, N373X, M374X, L375X, D378X, S379X, S379X, P382X, T383X, E385X, P390X, V393X, S398X, S400X, Q406X, S419X, N420X, F423X, N431X, G435X, N436X, P437X, N441X, G444X, T446X, T447X, R450X, T453X, T454X, T455X, P459X, Q463X, Y466X, G467X, G471X, S475X, G476X, S482X, G483X, G483X, C486X, V488X, and L489X, wherein the isolated Trichoderma reesei TrCel7A cellobiohydrolase comprises an amino acid sequence that is from about 75% to about 99.9% identical to amino acids 1-497 of SEQ ID NO: 1 and exhibits
a. increased specific activity,
b. reduced inhibition by glucose,
c. reduced inactivation by lignin,
d. increased activity in the presence of lignin,
e. increased activity in the presence of lignocellulose hydrolysate, or
f. any combination of a through e,
relative to a parental Trichoderma reesei TrCel7A cellobiohydrolase from which the isolated Trichoderma reesei TrCel7A cellobiohydrolase is derived.

9. The isolated Trichoderma reesei TrCel7A cellobiohydrolase of claim 8, comprising one or more amino acid substitution selected from the group consisting of T26A, T26S, R39L, N45D, S46G, S46A, S46I, S46L, S46T, Y511, D52R, D52T, D52W, G53A, G53M, G53R, G53W, N54S, N541, N54D, G75S, S87T, G88V, I93V, F95L, F95Y, A100T, A100V, A100W, A100L, A100G, K1025, K102R, L108I, M111T, D114E, F129S, D130N, D130E, V131A, P137S, C138S, G139E, G139M, G139Q, G139S, G139R, A143L, A143G, L144A, L144V, D150N, V155M, S156G, K181L, I183N, N184S, P194Q, N197L, N197V, N197Q, N197W, N197A, N200F, N200C, C209S, S211T, N2195, 1237T, D241L, D241R, D241V, G253D, G253R, G260D, N264Y, T271I, L282I, P314A, A316V, N324D, L326F, G339D, F343L, Q351R, K353M, T356I, G358S, M364V, D368A, D368G, D378E, Y370H, A372T, N373Y, M374V, L375A, D378E, S379C, S379E, P382L, P382Q, P382I, T383S, T383A, E385G, E385I, E385L, P390A, P390G, P390K, P390W, P390C, P390L, P390V, V393A, S398P, S400G, Q406P, S419F, N420D, F423Y, N431R, G435S, N436D, P437T, N441D, G444D, T446A, T447S, R450S, T453I, T453S, T454I, T455A, P459L, Q463L, Q463S, Q463K, Y466S, G467D, G471S, S475N, G476D, S482N, G483V, G483S, C486R, V488D, L489P, and L489Q, wherein the isolated Trichoderma reesei TrCel7A cellobiohydrolase comprises an amino acid sequence that is from about 80% to about 99.9% identical to amino acids 1-497 of SEQ ID NO: 1

10. The isolated Trichoderma reesei TrCel7A cellobiohydrolase of claim 9, comprising one or more amino acid substitution selected from the group consisting of: T26S, R39L, N45D, S46G, S46A, S46L, S46T, D52R, G53A, G53M, G53R, G53W, N54S, N541, N54D, S87T, A100T, A100V, A100W, A100L, A100G, K102R, F129S, D130N, G139M, G139S, G139R, A143L, A143G, L144V, I183N, N184S, N197L, N197V, N197Q, N197W, N197A, N200F, N200C, I237T, D241L, D241R, D241V, G253D, G253R, N264C, N264Y, T271I, L282I, P314A, A316V, N324D, L326F, G339D, F343L, G358S, M364V, D368A, D368G, A372T, S379C, P382L, P382Q, P382I, T383S, T383A, E385G, E385I, E385L, P390A, P390G, P390K, P390W, P390C, P390L, P390V, V393A, S398P, Q406P, F423Y, N431R, P437T, T446A, T447S, T454I, G467D, S475N, and G483V, wherein the isolated Trichoderma reesei TrCel7A cellobiohydrolase comprises an amino acid sequence that is from about 90% to about 99.9% identical to amino acids 1-497 of SEQ ID NO: 1.

11. A genetic construct comprising a nucleic acid sequence encoding
a. the isolated cellobiohydrolase of claim 1, or
b. the isolated Trichoderma reesei TrCel7A cellobiohydrolase claim 8.

12. A genetically modified microbe comprising the genetic construct of claim 11.

13. The genetically modified microbe of claim 12, wherein the microbe is a species of yeast or filamentous fungus.

14. The genetically modified microbe of claim 13, wherein the microbe is a species of Streptomyces, Saccharomyces, Pichia, Hansenula, Hypocrea, Trichoderma, Aspergillus, Fusarium, Chrysosporium, Sporotrichum, Myceliophthora, or a taxonomically equivalent genus thereof.

15. A process for producing an isolated cellobiohydrolase comprising,
a. transforming a host microbe with a genetic construct comprising a nucleic acid sequence encoding (i) the isolated cellobiohydrolase of claim 1, or (ii) the isolated Trichoderma reesei TrCel7A cellobiohydrolase of claim 8;
b. selecting a genetically modified microbe expressing the isolated cellobiohydrolase; and
c. culturing the genetically modified microbe under conditions that enable the expression of the isolated cellobiohydrolase from the genetic construct.

16. A cellulase enzyme mixture comprising a cellulase enzyme mixture comprising
a. the isolated cellobiohydrolase of claims 1, or
b. the isolated Trichoderma reesei TrCel7A cellobiohydrolase of claim 8.

17. A process for the hydrolyzing a cellulose substrate comprising contacting the substrate with the cellulase enzyme mixture of claim 16.

18. The process of claim 17, wherein the cellulose substrate is a pretreated lignocellulosic feedstock.

19. The process of claim 18, wherein the pretreated lignocellulose feedstock is selected from the group consisting of corn stover, wheat straw, barley straw, rice straw, oat straw, canola straw, soybean stover, corn fiber, sugar beet pulp, pulp mill fines and rejects, sugar cane bagasse, hardwood, softwood, sawdust, switch grass, miscanthus, cord grass, and reed canary grass.

The application's sequence listing, which the Patent Office published only in electronic form, follows.

SEQUENCE LISTING (446 sequences)

SEQ ID NO: 1 - protein, 497 aa, Trichoderma reesei [sequence omitted]

SEQ ID NO: 2 - protein, 509 aa, Myceliophthora thermophila
QNACTLTAENHPSLTWSKCTSGGSCTSVQGSITIDANWRWTHRTDSATNCYEGNKWDTSYCSDGPSCASKCCIDGADYSSTYGITTSGNSLNLKFVTKGQYSTNIGSRTYLMESDTKYQMFQLLGNEFTFDVDVSNLGCGLNGALYFVSMDADGGMSKYSGNKAGAKYGTGYCDSQCPRDLKFINGEANVENWQSSTNDANAGTGKYGSCCSEMDVWEANNMAAAFTPHPCTVIGQSRCEGDSCGGTYSTDRYAGICDPDGCDFNSYRQGNKTFYGKGMTVDTTKKITVVTQFLKNSAGELSEIKRFYVQNGKVIPNSESTIPGVEGNSITQDWCDRQKAAFGDVTDFQDKGGMVQMGKALAGPMVLVMSIWDDHAVNMLWLDSTWPIDGAGKPGAERGACPTTSGVPAEVEAEAPNSNVIFSNIRFGPIGSTVSGLPDGGSGNPNPPVSSSTPVPSSSTTSSGSSGPTGGTGVAKHYEQCGGIGFTGPTQCESPYTCTKLNDWYSQCL

SEQ ID NO: 3 - protein, 497 aa, Trichoderma reesei
QSACTLQSETHPHLTWQKCSSGGTCTQQTGSVVIDANWRWTHATNSSTNCYDGNTWSSTLCPDNETCAKNCCLDGAAYASTYGVTTSGNSLSIGFVTQSAQKNVGARLYLMASDTTYQEFTLLGNEFSFDVDVSQLPCGLNGALYFVSMDADGGVSKYPTNTAGAKYGTGYCDSQCPRDLKFINGQANVEGWEPSSNNANTGIGGHGSCCSEMDIWEANSISEALTPHPCTTVGQEICEGDGCGGTYSDNRYGGTCDPDGCDWNPYRLGNTSFYGPGSSFTLDTTKKLTVVTQFETSGAINRYYVQNGVTFQQPNAELGSYSGNELNDDYCTAEEAEFGGSSFSDKGGLTQFKKATSGGMVLVMSLWDDYYANMLWLDSTYPTNETSSTPGAVRGSCSTSSGVPAQVESQSPNAKVTFSNIKFGPIGSTGNPSGGNPPGGNPPGTTTTRRPATTTGSSPGPTQSHYGQCGGIGYSGPTVCASGTTCQVLNPYYSQCL

SEQ ID NO: 4 - protein, 497 aa, Trichoderma reesei
QSACTLQSETHPTLTWQKCSSGGTCTQQTGSVVIDANWRWTHATNSSTNCYDGNTWSSTLCPDNETCAKNCCLDGAAYASTYGVTTSGNSLSIGFVTQSAQKNVGARLYLMASDTTYQEFTLLGNEFSFDVDVSQLPCGLNGALYFVSMDADGGVSKYPTNTAGAKYGTGYCDSQCPRDLKFINGQANVEGWEPSSNNANTGIGGHGSCCSEMDIWEANSISEALTPHPCTTVGQEICEGDGCGGTYSDNRYGGTCDPDGCDWNPYRLGNTSFYGPGSSFTLDTTKKLTVVTQFETSGAINRYYVQNGVTFQQPNAELGSYSGNELNDDYCTAEEAEFGGSSFSDKGGLTQFKKATSGGMVLVMSLWDDYYANMLWLDSTYPTNETSSTPGAVRGSCSTSSGVPAQVESQSPNAKVTFSNIKFGPIGSTGNPSGGNPPGGNPPGTTTTRRPATTTGSSPGPTQSHYGQCGGIGYSGPTVCASGTTCQVLNPYYSQCL

SEQ ID NO: 5 - protein, 497 aa, Trichoderma reesei
QSACTLQSETHPPLTWQKCSSDGTCTQQTGSVVIDANWRWTHATNSSTNCYDGNTWSSTLCPDNETCAKNCCLDGAAYASTYGVTTSGNSLSIGFVTQSAQKNVGARLYLMASDTTYQEFTLLGNEFSFDVDVSQLPCGLNGALYFVSMDADGGVSKYPTNTAGAKYGTGYCDSQCPRDLKFINGQANVEGWEPSSNNANTGIGGHGSCCSEMDIWEANSISEALTPHPCTTVGQEICEGDGCGGTYSDNRYGGTCDPDGCDWNPYRLGNTSFYGPGSSFTLDTTKKLTVVTQFETSGAINRYYVQNGVTFQQPNAELGSYSGNELNDDYCTAEEAEFGGSSFSDKGGLTQFKKATSGGMVLVMSLWDDYYANMLWLDSTYPTNETSSTPGAVRGSCSTSSGVPAQVESQSPNAKVTFSNIKFGPIGSTGNPSGGNPPGGNPPGTTTTRRPATTTGSSPGPTQSHYGQCGGIGYSGPTVCASGTTCQVLNPYYSQCL

SEQ ID NO: 6 - protein, 497 aa, Trichoderma reesei
QSACTLQSETHPPLTWQKCSSGGTCAQQTGSVVIDANWRWTHATNSSTNCYDGNTWSSTLCPDNETCAKNCCLDGAAYASTYGVTTSGNSLSIGFVTQSAQKNVGARLYLMASDTTYQEFTLLGNEFSFDVDVSQLPCGLNGALYFVSMDADGGVSKYPTNTAGAKYGTGYCDSQCPRDLKFINGQANVEGWEPSSNNANTGIGGHGSCCSEMDIWEANSISEALTPHPCTTVGQEICEGDGCGGTYSDNRYGGTCDPDGCDWNPYRLGNTSFYGPGSSFTLDTTKKLTVVTQFETSGAINRYYVQNGVTFQQPNAELGSYSGNELNDDYCTAEEAEFGGSSFSDKGGLTQFKKATSGGMVLVMSLWDDYYANMLWLDSTYPTNETSSTPGAVRGSCSTSSGVPAQVESQSPNAKVTFSNIKFGPIGSTGNPSGGNPPGGNPPGTTTTRRPATTTGSSPGPTQSHYGQCGGIGYSGPTVCASGTTCQVLNPYYSQCL

SEQ ID NO: 7 - protein, 497 aa, Trichoderma reesei
QSACTLQSETHPPLTWQKCSSGGTCSQQTGSVVIDANWRWTHATNSSTNCYDGNTWSSTLCPDNETCAKNCCLDGAAYASTYGVTTSGNSLSIGFVTQSAQKNVGARLYLMASDTTYQEFTLLGNEFSFDVDVSQLPCGLNGALYFVSMDADGGVSKYPTNTAGAKYGTGYCDSQCPRDLKFINGQANVEGWEPSSNNANTGIGGHGSCCSEMDIWEANSISEALTPHPCTTVGQEICEGDGCGGTYSDNRYGGTCDPDGCDWNPYRLGNTSFYGPGSSFTLDTTKKLTVVTQFETSGAINRYYVQNGVTFQQPNAELGSYSGNELNDDYCTAEEAEFGGSSFSDKGGLTQFKKATSGGMVLVMSLWDDYYANMLWLDSTYPTNETSSTPGAVRGSCSTSSGVPAQVESQSPNAKVTFSNIKFGPIGSTGNPSGGNPPGGNPPGTTTTRRPATTTGSSPGPTQSHYGQCGGIGYSGPTVCASGTTCQVLNPYYSQCL

SEQ ID NO: 8 - protein, 497 aa, Trichoderma reesei
QSACTLQSETHPPLTWQKCSSGGTCTLQTGSVVIDANWRWTHATNSSTNCYDGNTWSSTLCPDNETCAKNCCLDGAAYASTYGVTTSGNSLSIGFVTQSAQKNVGARLYLMASDTTYQEFTLLGNEFSFDVDVSQLPCGLNGALYFVSMDADGGVSKYPTNTAGAKYGTGYCDSQCPRDLKFINGQANVEGWEPSSNNANTGIGGHGSCCSEMDIWEANSISEALTPHPCTTVGQEICEGDGCGGTYSDNRYGGTCDPDGCDWNPYRLGNTSFYGPGSSFTLDTTKKLTVVTQFETSGAINRYYVQNGVTFQQPNAELGSYSGNELNDDYCTAEEAEFGGSSFSDKGGLTQFKKATSGGMVLVMSLWDDYYANMLWLDSTYPTNETSSTPGAVRGSCSTSSGVPAQVESQSPNAKVTFSNIKFGPIGSTGNPSGGNPPGGNPPGTTTTRRPATTTGSSPGPTQSHYGQCGGIGYSGPTVCASGTTCQVLNPYYSQCL

SEQ ID NO: 9 - protein, 497 aa, Trichoderma reesei
QSACTLQSETHPPLTWQKCSSGGTCTQQTGSVVIDANWLWTHATNSSTNCYDGNTWSSTLCPDNETCAKNCCLDGAAYASTYGVTTSGNSLSIGFVTQSAQKNVGARLYLMASDTTYQEFTLLGNEFSFDVDVSQLPCGLNGALYFVSMDADGGVSKYPTNTAGAKYGTGYCDSQCPRDLKFINGQANVEGWEPSSNNANTGIGGHGSCCSEMDIWEANSISEALTPHPCTTVGQEICEGDGCGGTYSDNRYGGTCDPDGCDWNPYRLGNTSFYGPGSSFTLDTTKKLTVVTQFETSGAINRYYVQNGVTFQQPNAELGSYSGNELNDDYCTAEEAEFGGSSFSDKGGLTQFKKATSGGMVLVMSLWDDYYANMLWLDSTYPTNETSSTPGAVRGSCSTSSGVPAQVESQSPNAKVTFSNIKFGPIGSTGNPSGGNPPGGNPPGTTTTRRPATTTGSSPGPTQSHYGQCGGIGYSGPTVCASGTTCQVLNPYYSQCL

SEQ ID NO: 10 - protein, 497 aa, Trichoderma reesei
QSACTLQSETHPPLTWQKCSSGGTCTQQTGSVVIDANWRWTHATDSSTNCYDGNTWSSTLCPDNETCAKNCCLDGAAYASTYGVTTSGNSLSIGFVTQSAQKNVGARLYLMASDTTYQEFTLLGNEFSFDVDVSQLPCGLNGALYFVSMDADGGVSKYPTNTAGAKYGTGYCDSQCPRDLKFINGQANVEGWEPSSNNANTGIGGHGSCCSEMDIWEANSISEALTPHPCTTVGQEICEGDGCGGTYSDNRYGGTCDPDGCDWNPYRLGNTSFYGPGSSFTLDTTKKLTVVTQFETSGAINRYYVQNGVTFQQPNAELGSYSGNELNDDYCTAEEAEFGGSSFSDKGGLTQFKKATSGGMVLVMSLWDDYYANMLWLDSTYPTNETSSTPGAVRGSCSTSSGVPAQVESQSPNAKVTFSNIKFGPIGSTGNPSGGNPPGGNPPGTTTTRRPATTTGSSPGPTQSHYGQCGGIGYSGPTVCASGTTCQVLNPYYSQCL

SEQ ID NO: 11 - protein, 497 aa, Trichoderma reesei
QSACTLQSETHPPLTWQKCSSGGTCTQQTGSVVIDANWRWTHATNASTNCYDGNTWSSTLCPDNETCAKNCCLDGAAYASTYGVTTSGNSLSIGFVTQSAQKNVGARLYLMASDTTYQEFTLLGNEFSFDVDVSQLPCGLNGALYFVSMDADGGVSKYPTNTAGAKYGTGYCDSQCPRDLKFINGQANVEGWEPSSNNANTGIGGHGSCCSEMDIWEANSISEALTPHPCTTVGQEICEGDGCGGTYSDNRYGGTCDPDGCDWNPYRLGNTSFYGPGSSFTLDTTKKLTVVTQFETSGAINRYYVQNGVTFQQPNAELGSYSGNELNDDYCTAEEAEFGGSSFSDKGGLTQFKKATSGGMVLVMSLWDDYYANMLWLDSTYPTNETSSTPGAVRGSCSTSSGVPAQVESQSPNAKVTFSNIKFGPIGSTGNPSGGNPPGGNPPGTTTTRRPATTTGSSPGPTQSHYGQCGGIGYSGPTVCASGTTCQVLNPYYSQCL

SEQ ID NO: 12 - protein, 497 aa, Trichoderma reesei
QSACTLQSETHPPLTWQKCSSGGTCTQQTGSVVIDANWRWTHATNGSTNCYDGNTWSSTLCPDNETCAKNCCLDGAAYASTYGVTTSGNSLSIGFVTQSAQKNVGARLYLMASDTTYQEFTLLGNEFSFDVDVSQLPCGLNGALYFVSMDADGGVSKYPTNTAGAKYGTGYCDSQCPRDLKFINGQANVEGWEPSSNNANTGIGGHGSCCSEMDIWEANSISEALTPHPCTTVGQEICEGDGCGGTYSDNRYGGTCDPDGCDWNPYRLGNTSFYGPGSSFTLDTTKKLTVVTQFETSGAINRYYVQNGVTFQQPNAELGSYSGNELNDDYCTAEEAEFGGSSFSDKGGLTQFKKATSGGMVLVMSLWDDYYANMLWLDSTYPTNETSSTPGAVRGSCSTSSGVPAQVESQSPNAKVTFSNIKFGPIGSTGNPSGGNPPGGNPPGTTTTRRPATTTGSSPGPTQSHYGQCGGIGYSGPTVCASGTTCQVLNPYYSQCL

SEQ ID NO: 13 - protein, 497 aa, Trichoderma reesei
QSACTLQSETHPPLTWQKCSSGGTCTQQTGSVVIDANWRWTHATNLSTNCYDGNTWSSTLCPDNETCAKNCCLDGAAYASTYGVTTSGNSLSIGFVTQSAQKNVGARLYLMASDTTYQEFTLLGNEFSFDVDVSQLPCGLNGALYFVSMDADGGVSKYPTNTAGAKYGTGYCDSQCPRDLKFINGQANVEGWEPSSNNANTGIGGHGSCCSEMDIWEANSISEALTPHPCTTVGQEICEGDGCGGTYSDNRYGGTCDPDGCDWNPYRLGNTSFYGPGSSFTLDTTKKLTVVTQFETSGAINRYYVQNGVTFQQPNAELGSYSGNELNDDYCTAEEAEFGGSSFSDKGGLTQFKKATSGGMVLVMSLWDDYYANMLWLDSTYPTNETSSTPGAVRGSCSTSSGVPAQVESQSPNAKVTFSNIKFGPIGSTGNPSGGNPPGGNPPGTTTTRRPATTTGSSPGPTQSHYGQCGGIGYSGPTVCASGTTCQVLNPYYSQCL

SEQ ID NO: 14 - protein, 497 aa, Trichoderma reesei
QSACTLQSETHPPLTWQKCSSGGTCTQQTGSVVIDANWRWTHATNTSTNCYDGNTWSSTLCPDNETCAKNCCLDGAAYASTYGVTTSGNSLSIGFVTQSAQKNVGARLYLMASDTTYQEFTLLGNEFSFDVDVSQLPCGLNGALYFVSMDADGGVSKYPTNTAGAKYGTGYCDSQCPRDLKFINGQANVEGWEPSSNNANTGIGGHGSCCSEMDIWEANSISEALTPHPCTTVGQEICEGDGCGGTYSDNRYGGTCDPDGCDWNPYRLGNTSFYGPGSSFTLDTTKKLTVVTQFETSGAINRYYVQNGVTFQQPNAELGSYSGNELNDDYCTAEEAEFGGSSFSDKGGLTQFKKATSGGMVLVMSLWDDYYANMLWLDSTYPTNETSSTPGAVRGSCSTSSGVPAQVESQSPNAKVTFSNIKFGPIGSTGNPSGGNPPGGNPPGTTTTRRPATTTGSSPGPTQSHYGQCGGIGYSGPTVCASGTTCQVLNPYYSQCL

SEQ ID NO: 15 - protein, 497 aa, Trichoderma reesei
QSACTLQSETHPPLTWQKCSSGGTCTQQTGSVVIDANWRWTHATNSSTNCIDGNTWSSTLCPDNETCAKNCCLDGAAYASTYGVTTSGNSLSIGFVTQSAQKNVGARLYLMASDTTYQEFTLLGNEFSFDVDVSQLPCGLNGALYFVSMDADGGVSKYPTNTAGAKYGTGYCDSQCPRDLKFINGQANVEGWEPSSNNANTGIGGHGSCCSEMDIWEANSISEALTPHPCTTVGQEICEGDGCGGTYSDNRYGGTCDPDGCDWNPYRLGNTSFYGPGSSFTLDTTKKLTVVTQFETSGAINRYYVQNGVTFQQPNAELGSYSGNELNDDYCTAEEAEFGGSSFSDKGGLTQFKKATSGGMVLVMSLWDDYYANMLWLDSTYPTNETSSTPGAVRGSCSTSSGVPAQVESQSPNAKVTFSNIKFGPIGSTGNPSGGNPPGGNPPGTTTTRRPATTTGSSPGPTQSHYGQCGGIGYSGPTVCASGTTCQVLNPYYSQCL

SEQ ID NO: 16 - protein, 497 aa, Trichoderma reesei
QSACTLQSETHPPLTWQKCSSGGTCTQQTGSVVIDANWRWTHATNSSTNCYRGNTWSSTLCPDNETCAKNCCLDGAAYASTYGVTTSGNSLSIGFVTQSAQKNVGARLYLMASDTTYQEFTLLGNEFSFDVDVSQLPCGLNGALYFVSMDADGGVSKYPTNTAGAKYGTGYCDSQCPRDLKFINGQANVEGWEPSSNNANTGIGGHGSCCSEMDIWEANSISEALTPHPCTTVGQEICEGDGCGGTYSDNRYGGTCDPDGCDWNPYRLGNTSFYGPGSSFTLDTTKKLTVVTQFETSGAINRYYVQNGVTFQQPNAELGSYSGNELNDDYCTAEEAEFGGSSFSDKGGLTQFKKATSGGMVLVMSLWDDYYANMLWLDSTYPTNETSSTPGAVRGSCSTSSGVPAQVESQSPNAKVTFSNIKFGPIGSTGNPSGGNPPGGNPPGTTTTRRPATTTGSSPGPTQSHYGQCGGIGYSGPTVCASGTTCQVLNPYYSQCL

SEQ ID NO: 17 - protein, 497 aa, Trichoderma reesei
QSACTLQSETHPPLTWQKCSSGGTCTQQTGSVVIDANWRWTHATNSSTNCYTGNTWSSTLCPDNETCAKNCCLDGAAYASTYGVTTSGNSLSIGFVTQSAQKNVGARLYLMASDTTYQEFTLLGNEFSFDVDVSQLPCGLNGALYFVSMDADGGVSKYPTNTAGAKYGTGYCDSQCPRDLKFINGQANVEGWEPSSNNANTGIGGHGSCCSEMDIWEANSISEALTPHPCTTVGQEICEGDGCGGTYSDNRYGGTCDPDGCDWNPYRLGNTSFYGPGSSFTLDTTKKLTVVTQFETSGAINRYYVQNGVTFQQPNAELGSYSGNELNDDYCTAEEAEFGGSSFSDKGGLTQFKKATSGGMVLVMSLWDDYYANMLWLDSTYPTNETSSTPGAVRGSCSTSSGVPAQVESQSPNAKVTFSNIKFGPIGSTGNPSGGNPPGGNPPGTTTTRRPATTTGSSPGPTQSHYGQCGGIGYSGPTVCASGTTCQVLNPYYSQCL

SEQ ID NO: 18 - protein, 497 aa, Trichoderma reesei
QSACTLQSETHPPLTWQKCSSGGTCTQQTGSVVIDANWRWTHATNSSTNCYWGNTWSSTLCPDNETCAKNCCLDGAAYASTYGVTTSGNSLSIGFVTQSAQKNVGARLYLMASDTTYQEFTLLGNEFSFDVDVSQLPCGLNGALYFVSMDADGGVSKYPTNTAGAKYGTGYCDSQCPRDLKFINGQANVEGWEPSSNNANTGIGGHGSCCSEMDIWEANSISEALTPHPCTTVGQEICEGDGCGGTYSDNRYGGTCDPDGCDWNPYRLGNTSFYGPGSSFTLDTTKKLTVVTQFETSGAINRYYVQNGVTFQQPNAELGSYSGNELNDDYCTAEEAEFGGSSFSDKGGLTQFKKATSGGMVLVMSLWDDYYANMLWLDSTYPTNETSSTPGAVRGSCSTSSGVPAQVESQSPNAKVTFSNIKFGPIGSTGNPSGGNPPGGNPPGTTTTRRPATTTGSSPGPTQSHYGQCGGIGYSGPTVCASGTTCQVLNPYYSQCL

SEQ ID NO: 19 - protein, 497 aa, Trichoderma reesei
QSACTLQSETHPPLTWQKCSSGGTCTQQTGSVVIDANWRWTHATNSSTNCYDANTWSSTLCPDNETCAKNCCLDGAAYASTYGVTTSGNSLSIGFVTQSAQKNVGARLYLMASDTTYQEFTLLGNEFSFDVDVSQLPCGLNGALYFVSMDADGGVSKYPTNTAGAKYGTGYCDSQCPRDLKFINGQANVEGWEPSSNNANTGIGGHGSCCSEMDIWEANSISEALTPHPCTTVGQEICEGDGCGGTYSDNRYGGTCDPDGCDWNPYRLGNTSFYGPGSSFTLDTTKKLTVVTQFETSGAINRYYVQNGVTFQQPNAELGSYSGNELNDDYCTAEEAEFGGSSFSDKGGLTQFKKATSGGMVLVMSLWDDYYANMLWLDSTYPTNETSSTPGAVRGSCSTSSGVPAQVESQSPNAKVTFSNIKFGPIGSTGNPSGGNPPGGNPPGTTTTRRPATTTGSSPGPTQSHYGQCGGIGYSGPTVCASGTTCQVLNPYYSQCL

SEQ ID NO: 20 - protein, 497 aa, Trichoderma reesei
QSACTLQSETHPPLTWQKCSSGGTCTQQTGSVVIDANWRWTHATNSSTNCYDMNTWSSTLCPDNETCAKNCCLDGAAYASTYGVTTSGNSLSIGFVTQSAQKNVGARLYLMASDTTYQEFTLLGNEFSFDVDVSQLPCGLNGALYFVSMDADGGVSKYPTNTAGAKYGTGYCDSQCPRDLKFINGQANVEGWEPSSNNANTGIGGHGSCCSEMDIWEANSISEALTPHPCTTVGQEICEGDGCGGTYSDNRYGGTCDPDGCDWNPYRLGNTSFYGPGSSFTLDTTKKLTVVTQFETSGAINRYYVQNGVTFQQPNAELGSYSGNELNDDYCTAEEAEFGGSSFSDKGGLTQFKKATSGGMVLVMSLWDDYYANMLWLDSTYPTNETSSTPGAVRGSCSTSSGVPAQVESQSPNAKVTFSNIKFGPIGSTGNPSGGNPPGGNPPGTTTTRRPATTTGSSPGPTQSHYGQCGGIGYSGPTVCASGTTCQVLNPYYSQCL

SEQ ID NO: 21 - protein, 497 aa, Trichoderma reesei
QSACTLQSETHPPLTWQKCSSGGTCTQQTGSVVIDANWRWTHATNSSTNCYDRNTWSSTLCPDNETCAKNCCLDGAAYASTYGVTTSGNSLSIGFVTQSAQKNVGARLYLMASDTTYQEFTLLGNEFSFDVDVSQLPCGLNGALYFVSMDADGGVSKYPTNTAGAKYGTGYCDSQCPRDLKFINGQANVEGWEPSSNNANTGIGGHGSCCSEMDIWEANSISEALTPHPCTTVGQEICEGDGCGGTYSDNRYGGTCDPDGCDWNPYRLGNTSFYGPGSSFTLDTTKKLTVVTQFETSGAINRYYVQNGVTFQQPNAELGSYSGNELNDDYCTAEEAEFGGSSFSDKGGLTQFKKATSGGMVLVMSLWDDYYANMLWLDSTYPTNETSSTPGAVRGSCSTSSGVPAQVESQSPNAKVTFSNIKFGPIGSTGNPSGGNPPGGNPPGTTTTRRPATTTGSSPGPTQSHYGQCGGIGYSGPTVCASGTTCQVLNPYYSQCL

SEQ ID NO: 22 - protein, 497 aa, Trichoderma reesei
QSACTLQSETHPPLTWQKCSSGGTCTQQTGSVVIDANWRWTHATNSSTNCYDWNTWSSTLCPDNETCAKNCCLDGAAYASTYGVTTSGNSLSIGFVTQSAQKNVGARLYLMASDTTYQEFTLLGNEFSFDVDVSQLPCGLNGALYFVSMDADGGVSKYPTNTAGAKYGTGYCDSQCPRDLKFINGQANVEGWEPSSNNANTGIGGHGSCCSEMDIWEANSISEALTPHPCTTVGQEICEGDGCGGTYSDNRYGGTCDPDGCDWNPYRLGNTSFYGPGSSFTLDTTKKLTVVTQFETSGAINRYYVQNGVTFQQPNAELGSYSGNELNDDYCTAEEAEFGGSSFSDKGGLTQFKKATSGGMVLVMSLWDDYYANMLWLDSTYPTNETSSTPGAVRGSCSTSSGVPAQVESQSPNAKVTFSNIKFGPIGSTGNPSGGNPPGGNPPGTTTTRRPATTTGSSPGPTQSHYGQCGGIGYSGPTVCASGTTCQVLNPYYSQCL

SEQ ID NO: 23 - protein, 497 aa, Trichoderma reesei
QSACTLQSETHPPLTWQKCSSGGTCTQQTGSVVIDANWRWTHATNSSTNCYDGDTWSSTLCPDNETCAKNCCLDGAAYASTYGVTTSGNSLSIGFVTQSAQKNVGARLYLMASDTTYQEFTLLGNEFSFDVDVSQLPCGLNGALYFVSMDADGGVSKYPTNTAGAKYGTGYCDSQCPRDLKFINGQANVEGWEPSSNNANTGIGGHGSCCSEMDIWEANSISEALTPHPCTTVGQEICEGDGCGGTYSDNRYGGTCDPDGCDWNPYRLGNTSFYGPGSSFTLDTTKKLTVVTQFETSGAINRYYVQNGVTFQQPNAELGSYSGNELNDDYCTAEEAEFGGSSFSDKGGLTQFKKATSGGMVLVMSLWDDYYANMLWLDSTYPTNETSSTPGAVRGSCSTSSGVPAQVESQSPNAKVTFSNIKFGPIGSTGNPSGGNPPGGNPPGTTTTRRPATTTGSSPGPTQSHYGQCGGIGYSGPTVCASGTTCQVLNPYYSQCL

SEQ ID NO: 24 - protein, 497 aa, Trichoderma reesei
QSACTLQSETHPPLTWQKCSSGGTCTQQTGSVVIDANWRWTHATNSSTNCYDGITWSSTLCPDNETCAKNCCLDGAAYASTYGVTTSGNSLSIGFVTQSAQKNVGARLYLMASDTTYQEFTLLGNEFSFDVDVSQLPCGLNGALYFVSMDADGGVSKYPTNTAGAKYGTGYCDSQCPRDLKFINGQANVEGWEPSSNNANTGIGGHGSCCSEMDIWEANSISEALTPHPCTTVGQEICEGDGCGGTYSDNRYGGTCDPDGCDWNPYRLGNTSFYGPGSSFTLDTTKKLTVVTQFETSGAINRYYVQNGVTFQQPNAELGSYSGNELNDDYCTAEEAEFGGSSFSDKGGLTQFKKATSGGMVLVMSLWDDYYANMLWLDSTYPTNETSSTPGAVRGSCSTSSGVPAQVESQSPNAKVTFSNIKFGPIGSTGNPSGGNPPGGNPPGTTTTRRPATTTGSSPGPTQSHYGQCGGIGYSGPTVCASGTTCQVLNPYYSQCL

SEQ ID NO: 25 - protein, 497 aa, Trichoderma reesei
QSACTLQSETHPPLTWQKCSSGGTCTQQTGSVVIDANWRWTHATNSSTNCYDGSTWSSTLCPDNETCAKNCCLDGAAYASTYGVTTSGNSLSIGFVTQSAQKNVGARLYLMASDTTYQEFTLLGNEFSFDVDVSQLPCGLNGALYFVSMDADGGVSKYPTNTAGAKYGTGYCDSQCPRDLKFINGQANVEGWEPSSNNANTGIGGHGSCCSEMDIWEANSISEALTPHPCTTVGQEICEGDGCGGTYSDNRYGGTCDPDGCDWNPYRLGNTSFYGPGSSFTLDTTKKLTVVTQFETSGAINRYYVQNGVTFQQPNAELGSYSGNELNDDYCTAEEAEFGGSSFSDKGGLTQFKKATSGGMVLVMSLWDDYYANMLWLDSTYPTNETSSTPGAVRGSCSTSSGVPAQVESQSPNAKVTFSNIKFGPIGSTGNPSGGNPPGGNPPGTTTTRRPATTTGSSPGPTQSHYGQCGGIGYSGPTVCASGTTCQVLNPYYSQCL

SEQ ID NO: 26 - protein, 497 aa, Trichoderma reesei
QSACTLQSETHPPLTWQKCSSGGTCTQQTGSVVIDANWRWTHATNSSTNCYDGNTWSSALCPDNETCAKNCCLDGAAYASTYGVTTSGNSLSIGFVTQSAQKNVGARLYLMASDTTYQEFTLLGNEFSFDVDVSQLPCGLNGALYFVSMDADGGVSKYPTNTAGAKYGTGYCDSQCPRDLKFINGQANVEGWEPSSNNANTGIGGHGSCCSEMDIWEANSISEALTPHPCTTVGQEICEGDGCGGTYSDNRYGGTCDPDGCDWNPYRLGNTSFYGPGSSFTLDTTKKLTVVTQFETSGAINRYYVQNGVTFQQPNAELGSYSGNELNDDYCTAEEAEFGGSSFSDKGGLTQFKKATSGGMVLVMSLWDDYYANMLWLDSTYPTNETSSTPGAVRGSCSTSSGVPAQVESQSPNAKVTFSNIKFGPIGSTGNPSGGNPPGGNPPGTTTTRRPATTTGSSPGPTQSHYGQCGGIGYSGPTVCASGTTCQVLNPYYSQCL

SEQ ID NO: 27 - protein, 497 aa, Trichoderma reesei
QSACTLQSETHPPLTWQKCSSGGTCTQQTGSVVIDANWRWTHATNSSTNCYDGNTWSSTLCPDNETCAKNCCLDSAAYASTYGVTTSGNSLSIGFVTQSAQKNVGARLYLMASDTTYQEFTLLGNEFSFDVDVSQLPCGLNGALYFVSMDADGGVSKYPTNTAGAKYGTGYCDSQCPRDLKFINGQANVEGWEPSSNNANTGIGGHGSCCSEMDIWEANSISEALTPHPCTTVGQEICEGDGCGGTYSDNRYGGTCDPDGCDWNPYRLGNTSFYGPGSSFTLDTTKKLTVVTQFETSGAINRYYVQNGVTFQQPNAELGSYSGNELNDDYCTAEEAEFGGSSFSDKGGLTQFKKATSGGMVLVMSLWDDYYANMLWLDSTYPTNETSSTPGAVRGSCSTSSGVPAQVESQSPNAKVTFSNIKFGPIGSTGNPSGGNPPGGNPPGTTTTRRPATTTGSSPGPTQSHYGQCGGIGYSGPTVCASGTTCQVLNPYYSQCL

SEQ ID NO: 28 - protein, 497 aa, Trichoderma reesei
QSACTLQSETHPPLTWQKCSSGGTCTQQTGSVVIDANWRWTHATNSSTNCYDGNTWSSTLCPDNETCAKNCCLDGAAYASTYGVTTTGNSLSIGFVTQSAQKNVGARLYLMASDTTYQEFTLLGNEFSFDVDVSQLPCGLNGALYFVSMDADGGVSKYPTNTAGAKYGTGYCDSQCPRDLKFINGQANVEGWEPSSNNANTGIGGHGSCCSEMDIWEANSISEALTPHPCTTVGQEICEGDGCGGTYSDNRYGGTCDPDGCDWNPYRLGNTSFYGPGSSFTLDTTKKLTVVTQFETSGAINRYYVQNGVTFQQPNAELGSYSGNELNDDYCTAEEAEFGGSSFSDKGGLTQFKKATSGGMVLVMSLWDDYYANMLWLDSTYPTNETSSTPGAVRGSCSTSSGVPAQVESQSPNAKVTFSNIKFGPIGSTGNPSGGNPPGGNPPGTTTTRRPATTTGSSPGPTQSHYGQCGGIGYSGPTVCASGTTCQVLNPYYSQCL

SEQ ID NO: 29 - protein, 497 aa, Trichoderma reesei
QSACTLQSETHPPLTWQKCSSGGTCTQQTGSVVIDANWRWTHATNSSTNCYDGNTWSSTLCPDNETCAKNCCLDGAAYASTYGVTTSVNSLSIGFVTQSAQKNVGARLYLMASDTTYQEFTLLGNEFSFDVDVSQLPCGLNGALYFVSMDADGGVSKYPTNTAGAKYGTGYCDSQCPRDLKFINGQANVEGWEPSSNNANTGIGGHGSCCSEMDIWEANSISEALTPHPCTTVGQEICEGDGCGGTYSDNRYGGTCDPDGCDWNPYRLGNTSFYGPGSSFTLDTTKKLTVVTQFETSGAINRYYVQNGVTFQQPNAELGSYSGNELNDDYCTAEEAEFGGSSFSDKGGLTQFKKATSGGMVLVMSLWDDYYANMLWLDSTYPTNETSSTPGAVRGSCSTSSGVPAQVESQSPNAKVTFSNIKFGPIGSTGNPSGGNPPGGNPPGTTTTRRPATTTGSSPGPTQSHYGQCGGIGYSGPTVCASGTTCQVLNPYYSQCL

SEQ ID NO: 30 - protein, 497 aa, Trichoderma reesei
QSACTLQSETHPPLTWQKCSSGGTCTQQTGSVVIDANWRWTHATNSSTNCYDGNTWSSTLCPDNETCAKNCCLDGAAYASTYGVTTSGNSLSVGFVTQSAQKNVGARLYLMASDTTYQEFTLLGNEFSFDVDVSQLPCGLNGALYFVSMDADGGVSKYPTNTAGAKYGTGYCDSQCPRDLKFINGQANVEGWEPSSNNANTGIGGHGSCCSEMDIWEANSISEALTPHPCTTVGQEICEGDGCGGTYSDNRYGGTCDPDGCDWNPYRLGNTSFYGPGSSFTLDTTKKLTVVTQFETSGAINRYYVQNGVTFQQPNAELGSYSGNELNDDYCTAEEAEFGGSSFSDKGGLTQFKKATSGGMVLVMSLWDDYYANMLWLDSTYPTNETSSTPGAVRGSCSTSSGVPAQVESQSPNAKVTFSNIKFGPIGSTGNPSGGNPPGGNPPGTTTTRRPATTTGSSPGPTQSHYGQCGGIGYSGPTVCASGTTCQVLNPYYSQCL

SEQ ID NO: 31 - protein, 497 aa, Trichoderma reesei
QSACTLQSETHPPLTWQKCSSGGTCTQQTGSVVIDANWRWTHATNSSTNCYDGNTWSSTLCPDNETCAKNCCLDGAAYASTYGVTTSGNSLSIGLVTQSAQKNVGARLYLMASDTTYQEFTLLGNEFSFDVDVSQLPCGLNGALYFVSMDADGGVSKYPTNTAGAKYGTGYCDSQCPRDLKFINGQANVEGWEPSSNNANTGIGGHGSCCSEMDIWEANSISEALTPHPCTTVGQEICEGDGCGGTYSDNRYGGTCDPDGCDWNPYRLGNTSFYGPGSSFTLDTTKKLTVVTQFETSGAINRYYVQNGVTFQQPNAELGSYSGNELNDDYCTAEEAEFGGSSFSDKGGLTQFKKATSGGMVLVMSLWDDYYANMLWLDSTYPTNETSSTPGAVRGSCSTSSGVPAQVESQSPNAKVTFSNIKFGPIGSTGNPSGGNPPGGNPPGTTTTRRPATTTGSSPGPTQSHYGQCGGIGYSGPTVCASGTTCQVLNPYYSQCL

SEQ ID NO: 32 - protein, 497 aa, Trichoderma reesei
QSACTLQSETHPPLTWQKCSSGGTCTQQTGSVVIDANWRWTHATNSSTNCYDGNTWSSTLCPDNETCAKNCCLDGAAYASTYGVTTSGNSLSIGYVTQSAQKNVGARLYLMASDTTYQEFTLLGNEFSFDVDVSQLPCGLNGALYFVSMDADGGVSKYPTNTAGAKYGTGYCDSQCPRDLKFINGQANVEGWEPSSNNANTGIGGHGSCCSEMDIWEANSISEALTPHPCTTVGQEICEGDGCGGTYSDNRYGGTCDPDGCDWNPYRLGNTSFYGPGSSFTLDTTKKLTVVTQFETSGAINRYYVQNGVTFQQPNAELGSYSGNELNDDYCTAEEAEFGGSSFSDKGGLTQFKKATSGGMVLVMSLWDDYYANMLWLDSTYPTNETSSTPGAVRGSCSTSSGVPAQVESQSPNAKVTFSNIKFGPIGSTGNPSGGNPPGGNPPGTTTTRRPATTTGSSPGPTQSHYGQCGGIGYSGPTVCASGTTCQVLNPYYSQCL

SEQ ID NO: 33 - protein, 497 aa, Trichoderma reesei
QSACTLQSETHPPLTWQKCSSGGTCTQQTGSVVIDANWRWTHATNSSTNCYDGNTWSSTLCPDNETCAKNCCLDGAAYASTYGVTTSGNSLSIGFVTQSGQKNVGARLYLMASDTTYQEFTLLGNEFSFDVDVSQLPCGLNGALYFVSMDADGGVSKYPTNTAGAKYGTGYCDSQCPRDLKFINGQANVEGWEPSSNNANTGIGGHGSCCSEMDIWEANSISEALTPHPCTTVGQEICEGDGCGGTYSDNRYGGTCDPDGCDWNPYRLGNTSFYGPGSSFTLDTTKKLTVVTQFETSGAINRYYVQNGVTFQQPNAELGSYSGNELNDDYCTAEEAEFGGSSFSDKGGLTQFKKATSGGMVLVMSLWDDYYANMLWLDSTYPTNETSSTPGAVRGSCSTSSGVPAQVESQSPNAKVTFSNIKFGPIGSTGNPSGGNPPGGNPPGTTTTRRPATTTGSSPGPTQSHYGQCGGIGYSGPTVCASGTTCQVLNPYYSQCL

SEQ ID NO: 34 - protein, 497 aa, Trichoderma reesei
QSACTLQSETHPPLTWQKCSSGGTCTQQTGSVVIDANWRWTHATNSSTNCYDGNTWSSTLCPDNETCAKNCCLDGAAYASTYGVTTSGNSLSIGFVTQSLQKNVGARLYLMASDTTYQEFTLLGNEFSFDVDVSQLPCGLNGALYFVSMDADGGVSKYPTNTAGAKYGTGYCDSQCPRDLKFINGQANVEGWEPSSNNANTGIGGHGSCCSEMDIWEANSISEALTPHPCTTVGQEICEGDGCGGTYSDNRYGGTCDPDGCDWNPYRLGNTSFYGPGSSFTLDTTKKLTVVTQFETSGAINRYYVQNGVTFQQPNAELGSYSGNELNDDYCTAEEAEFGGSSFSDKGGLTQFKKATSGGMVLVMSLWDDYYANMLWLDSTYPTNETSSTPGAVRGSCSTSSGVPAQVESQSPNAKVTFSNIKFGPIGSTGNPSGGNPPGGNPPGTTTTRRPATTTGSSPGPTQSHYGQCGGIGYSGPTVCASGTTCQVLNPYYSQCL

SEQ ID NO: 35 - protein, 497 aa, Trichoderma reesei
QSACTLQSETHPPLTWQKCSSGGTCTQQTGSVVIDANWRWTHATNSSTNCYDGNTWSSTLCPDNETCAKNCCLDGAAYASTYGVTTSGNSLSIGFVTQSTQKNVGARLYLMASDTTYQEFTLLGNEFSFDVDVSQLPCGLNGALYFVSMDADGGVSKYPTNTAGAKYGTGYCDSQCPRDLKFINGQANVEGWEPSSNNANTGIGGHGSCCSEMDIWEANSISEALTPHPCTTVGQEICEGDGCGGTYSDNRYGGTCDPDGCDWNPYRLGNTSFYGPGSSFTLDTTKKLTVVTQFETSGAINRYYVQNGVTFQQPNAELGSYSGNELNDDYCTAEEAEFGGSSFSDKGGLTQFKKATSGGMVLVMSLWDDYYANMLWLDSTYPTNETSSTPGAVRGSCSTSSGVPAQVESQSPNAKVTFSNIKFGPIGSTGNPSGGNPPGGNPPGTTTTRRPATTTGSSPGPTQSHYGQCGGIGYSGPTVCASGTTCQVLNPYYSQCL

SEQ ID NO: 36 - protein, 497 aa, Trichoderma reesei
QSACTLQSETHPPLTWQKCSSGGTCTQQTGSVVIDANWRWTHATNSSTNCYDGNTWSSTLCPDNETCAKNCCLDGAAYASTYGVTTSGNSLSIGFVTQSVQKNVGARLYLMASDTTYQEFTLLGNEFSFDVDVSQLPCGLNGALYFVSMDADGGVSKYPTNTAGAKYGTGYCDSQCPRDLKFINGQANVEGWEPSSNNANTGIGGHGSCCSEMDIWEANSISEALTPHPCTTVGQEICEGDGCGGTYSDNRYGGTCDPDGCDWNPYRLGNTSFYGPGSSFTLDTTKKLTVVTQFETSGAINRYYVQNGVTFQQPNAELGSYSGNELNDDYCTAEEAEFGGSSFSDKGGLTQFKKATSGGMVLVMSLWDDYYANMLWLDSTYPTNETSSTPGAVRGSCSTSSGVPAQVESQSPNAKVTFSNIKFGPIGSTGNPSGGNPPGGNPPGTTTTRRPATTTGSSPGPTQSHYGQCGGIGYSGPTVCASGTTCQVLNPYYSQCL

SEQ ID NO: 37 - protein, 497 aa, Trichoderma reesei
QSACTLQSETHPPLTWQKCSSGGTCTQQTGSVVIDANWRWTHATNSSTNCYDGNTWSSTLCPDNETCAKNCCLDGAAYASTYGVTTSGNSLSIGFVTQSWQKNVGARLYLMASDTTYQEFTLLGNEFSFDVDVSQLPCGLNGALYFVSMDADGGVSKYPTNTAGAKYGTGYCDSQCPRDLKFINGQANVEGWEPSSNNANTGIGGHGSCCSEMDIWEANSISEALTPHPCTTVGQEICEGDGCGGTYSDNRYGGTCDPDGCDWNPYRLGNTSFYGPGSSFTLDTTKKLTVVTQFETSGAINRYYVQNGVTFQQPNAELGSYSGNELNDDYCTAEEAEFGGSSFSDKGGLTQFKKATSGGMVLVMSLWDDYYANMLWLDSTYPTNETSSTPGAVRGSCSTSSGVPAQVESQSPNAKVTFSNIKFGPIGSTGNPSGGNPPGGNPPGTTTTRRPATTTGSSPGPTQSHYGQCGGIGYSGPTVCASGTTCQVLNPYYSQCL

SEQ ID NO: 38 - protein, 497 aa, Trichoderma reesei
QSACTLQSETHPPLTWQKCSSGGTCTQQTGSVVIDANWRWTHATNSSTNCYDGNTWSSTLCPDNETCAKNCCLDGAAYASTYGVTTSGNSLSIGFVTQSAQRNVGARLYLMASDTTYQEFTLLGNEFSFDVDVSQLPCGLNGALYFVSMDADGGVSKYPTNTAGAKYGTGYCDSQCPRDLKFINGQANVEGWEPSSNNANTGIGGHGSCCSEMDIWEANSISEALTPHPCTTVGQEICEGDGCGGTYSDNRYGGTCDPDGCDWNPYRLGNTSFYGPGSSFTLDTTKKLTVVTQFETSGAINRYYVQNGVTFQQPNAELGSYSGNELNDDYCTAEEAEFGGSSFSDKGGLTQFKKATSGGMVLVMSLWDDYYANMLWLDSTYPTNETSSTPGAVRGSCSTSSGVPAQVESQSPNAKVTFSNIKFGPIGSTGNPSGGNPPGGNPPGTTTTRRPATTTGSSPGPTQSHYGQCGGIGYSGPTVCASGTTCQVLNPYYSQCL

SEQ ID NO: 39 - protein, 497 aa, Trichoderma reesei
QSACTLQSETHPPLTWQKCSSGGTCTQQTGSVVIDANWRWTHATNSSTNCYDGNTWSSTLCPDNETCAKNCCLDGAAYASTYGVTTSGNSLSIGFVTQSAQSNVGARLYLMASDTTYQEFTLLGNEFSFDVDVSQLPCGLNGALYFVSMDADGGVSKYPTNTAGAKYGTGYCDSQCPRDLKFINGQANVEGWEPSSNNANTGIGGHGSCCSEMDIWEANSISEALTPHPCTTVGQEICEGDGCGGTYSDNRYGGTCDPDGCDWNPYRLGNTSFYGPGSSFTLDTTKKLTVVTQFETSGAINRYYVQNGVTFQQPNAELGSYSGNELNDDYCTAEEAEFGGSSFSDKGGLTQFKKATSGGMVLVMSLWDDYYANMLWLDSTYPTNETSSTPGAVRGSCSTSSGVPAQVESQSPNAKVTFSNIKFGPIGSTGNPSGGNPPGGNPPGTTTTRRPATTTGSSPGPTQSHYGQCGGIGYSGPTVCASGTTCQVLNPYYSQCL

SEQ ID NO: 40 - protein, 497 aa, Trichoderma reesei
QSACTLQSETHPPLTWQKCSSGGTCTQQTGSVVIDANWRWTHATNSSTNCYDGNTWSSTLCPDNETCAKNCCLDGAAYASTYGVTTSGNSLSIGFVTQSAQKNVGARIYLMASDTTYQEFTLLGNEFSFDVDVSQLPCGLNGALYFVSMDADGGVSKYPTNTAGAKYGTGYCDSQCPRDLKFINGQANVEGWEPSSNNANTGIGGHGSCCSEMDIWEANSISEALTPHPCTTVGQEICEGDGCGGTYSDNRYGGTCDPDGCDWNPYRLGNTSFYGPGSSFTLDTTKKLTVVTQFETSGAINRYYVQNGVTFQQPNAELGSYSGNELNDDYCTAEEAEFGGSSFSDKGGLTQFKKATSGGMVLVMSLWDDYYANMLWLDSTYPTNETSSTPGAVRGSCSTSSGVPAQVESQSPNAKVTFSNIKFGPIGSTGNPSGGNPPGGNPPGTTTTRRPATTTGSSPGPTQSHYGQCGGIGYSGPTVCASGTTCQVLNPYYSQCL

SEQ ID NO: 41 - protein, 497 aa, Trichoderma reesei
QSACTLQSETHPPLTWQKCSSGGTCTQQTGSVVIDANWRWTHATNSSTNCYDGNTWSSTLCPDNETCAKNCCLDGAAYASTYGVTTSGNSLSIGFVTQSAQKNVGARLYLTASDTTYQEFTLLGNEFSFDVDVSQLPCGLNGALYFVSMDADGGVSKYPTNTAGAKYGTGYCDSQCPRDLKFINGQANVEGWEPSSNNANTGIGGHGSCCSEMDIWEANSISEALTPHPCTTVGQEICEGDGCGGTYSDNRYGGTCDPDGCDWNPYRLGNTSFYGPGSSFTLDTTKKLTVVTQFETSGAINRYYVQNGVTFQQPNAELGSYSGNELNDDYCTAEEAEFGGSSFSDKGGLTQFKKATSGGMVLVMSLWDDYYANMLWLDSTYPTNETSSTPGAVRGSCSTSSGVPAQVESQSPNAKVTFSNIKFGPIGSTGNPSGGNPPGGNPPGTTTTRRPATTTGSSPGPTQSHYGQCGGIGYSGPTVCASGTTCQVLNPYYSQCL

SEQ ID NO: 42 - protein, 497 aa, Trichoderma reesei
QSACTLQSETHPPLTWQKCSSGGTCTQQTGSVVIDANWRWTHATNSSTNCYDGNTWSSTLCPDNETCAKNCCLDGAAYASTYGVTTSGNSLSIGFVTQSAQKNVGARLYLMASETTYQEFTLLGNEFSFDVDVSQLPCGLNGALYFVSMDADGGVSKYPTNTAGAKYGTGYCDSQCPRDLKFINGQANVEGWEPSSNNANTGIGGHGSCCSEMDIWEANSISEALTPHPCTTVGQEICEGDGCGGTYSDNRYGGTCDPDGCDWNPYRLGNTSFYGPGSSFTLDTTKKLTVVTQFETSGAINRYYVQNGVTFQQPNAELGSYSGNELNDDYCTAEEAEFGGSSFSDKGGLTQFKKATSGGMVLVMSLWDDYYANMLWLDSTYPTNETSSTPGAVRGSCSTSSGVPAQVESQSPNAKVTFSNIKFGPIGSTGNPSGGNPPGGNPPGTTTTRRPATTTGSSPGPTQSHYGQCGGIGYSGPTVCASGTTCQVLNPYYSQCL

SEQ ID NO: 43 - protein, 497 aa, Trichoderma reesei
QSACTLQSETHPPLTWQKCSSGGTCTQQTGSVVIDANWRWTHATNSSTNCYDGNTWSSTLCPDNETCAKNCCLDGAAYASTYGVTTSGNSLSIGFVTQSAQKNVGARLYLMASDTTYQEFTLLGNEFSSDVDVSQLPCGLNGALYFVSMDADGGVSKYPTNTAGAKYGTGYCDSQCPRDLKFINGQANVEGWEPSSNNANTGIGGHGSCCSEMDIWEANSISEALTPHPCTTVGQEICEGDGCGGTYSDNRYGGTCDPDGCDWNPYRLGNTSFYGPGSSFTLDTTKKLTVVTQFETSGAINRYYVQNGVTFQQPNAELGSYSGNELNDDYCTAEEAEFGGSSFSDKGGLTQFKKATSGGMVLVMSLWDDYYANMLWLDSTYPTNETSSTPGAVRGSCSTSSGVPAQVESQSPNAKVTFSNIKFGPIGSTGNPSGGNPPGGNPPGTTTTRRPATTTGSSPGPTQSHYGQCGGIGYSGPTVCASGTTCQVLNPYYSQCL

SEQ ID NO: 44 - protein, 497 aa, Trichoderma reesei
QSACTLQSETHPPLTWQKCSSGGTCTQQTGSVVIDANWRWTHATNSSTNCYDGNTWSSTLCPDNETCAKNCCLDGAAYASTYGVTTSGNSLSIGFVTQSAQKNVGARLYLMASDTTYQEFTLLGNEFSFEVDVSQLPCGLNGALYFVSMDADGGVSKYPTNTAGAKYGTGYCDSQCPRDLKFINGQANVEGWEPSSNNANTGIGGHGSCCSEMDIWEANSISEALTPHPCTTVGQEICEGDGCGGTYSDNRYGGTCDPDGCDWNPYRLGNTSFYGPGSSFTLDTTKKLTVVTQFETSGAINRYYVQNGVTFQQPNAELGSYSGNELNDDYCTAEEAEFGGSSFSDKGGLTQFKKATSGGMVLVMSLWDDYYANMLWLDSTYPTNETSSTPGAVRGSCSTSSGVPAQVESQSPNAKVTFSNIKFGPIGSTGNPSGGNPPGGNPPGTTTTRRPATTTGSSPGPTQSHYGQCGGIGYSGPTVCASGTTCQVLNPYYSQCL

SEQ ID NO: 45 - protein, 497 aa, Trichoderma reesei
QSACTLQSETHPPLTWQKCSSGGTCTQQTGSVVIDANWRWTHATNSSTNCYDGNTWSSTLCPDNETCAKNCCLDGAAYASTYGVTTSGNSLSIGFVTQSAQKNVGARLYLMASDTTYQEFTLLGNEFSFNVDVSQLPCGLNGALYFVSMDADGGVSKYPTNTAGAKYGTGYCDSQCPRDLKFINGQANVEGWEPSSNNANTGIGGHGSCCSEMDIWEANSISEALTPHPCTTVGQEICEGDGCGGTYSDNRYGGTCDPDGCDWNPYRLGNTSFYGPGSSFTLDTTKKLTVVTQFETSGAINRYYVQNGVTFQQPNAELGSYSGNELNDDYCTAEEAEFGGSSFSDKGGLTQFKKATSGGMVLVMSLWDDYYANMLWLDSTYPTNETSSTPGAVRGSCSTSSGVPAQVESQSPNAKVTFSNIKFGPIGSTGNPSGGNPPGGNPPGTTTTRRPATTTGSSPGPTQSHYGQCGGIGYSGPTVCASGTTCQVLNPYYSQCL

SEQ ID NO: 46 - protein, 497 aa, Trichoderma reesei
QSACTLQSETHPPLTWQKCSSGGTCTQQTGSVVIDANWRWTHATNSSTNCYDGNTWSSTLCPDNETCAKNCCLDGAAYASTYGVTTSGNSLSIGFVTQSAQKNVGARLYLMASDTTYQEFTLLGNEFSFDADVSQLPCGLNGALYFVSMDADGGVSKYPTNTAGAKYGTGYCDSQCPRDLKFINGQANVEGWEPSSNNANTGIGGHGSCCSEMDIWEANSISEALTPHPCTTVGQEICEGDGCGGTYSDNRYGGTCDPDGCDWNPYRLGNTSFYGPGSSFTLDTTKKLTVVTQFETSGAINRYYVQNGVTFQQPNAELGSYSGNELNDDYCTAEEAEFGGSSFSDKGGLTQFKKATSGGMVLVMSLWDDYYANMLWLDSTYPTNETSSTPGAVRGSCSTSSGVPAQVESQSPNAKVTFSNIKFGPIGSTGNPSGGNPPGGNPPGTTTTRRPATTTGSSPGPTQSHYGQCGGIGYSGPTVCASGTTCQVLNPYYSQCL

SEQ ID NO: 47 - protein, 497 aa, Trichoderma reesei
QSACTLQSETHPPLTWQKCSSGGTCTQQTGSVVIDANWRWTHATNSSTNCYDGNTWSSTLCPDNETCAKNCCLDGAAYASTYGVTTSGNSLSIGFVTQSAQKNVGARLYLMASDTTYQEFTLLGNEFSFDVDVSQLSCGLNGALYFVSMDADGGVSKYPTNTAGAKYGTGYCDSQCPRDLKFINGQANVEGWEPSSNNANTGIGGHGSCCSEMDIWEANSISEALTPHPCTTVGQEICEGDGCGGTYSDNRYGGTCDPDGCDWNPYRLGNTSFYGPGSSFTLDTTKKLTVVTQFETSGAINRYYVQNGVTFQQPNAELGSYSGNELNDDYCTAEEAEFGGSSFSDKGGLTQFKKATSGGMVLVMSLWDDYYANMLWLDSTYPTNETSSTPGAVRGSCSTSSGVPAQVESQSPNAKVTFSNIKFGPIGSTGNPSGGNPPGGNPPGTTTTRRPATTTGSSPGPTQSHYGQCGGIGYSGPTVCASGTTCQVLNPYYSQCL

SEQ ID NO: 48 - protein, 497 aa, Trichoderma reesei
QSACTLQSETHPPLTWQKCSSGGTCTQQTGSVVIDANWRWTHATNSSTNCYDGNTWSSTLCPDNETCAKNCCLDGAAYASTYGVTTSGNSLSIGFVTQSAQKNVGARLYLMASDTTYQEFTLLGNEFSFDVDVSQLPSGLNGALYFVSMDADGGVSKYPTNTAGAKYGTGYCDSQCPRDLKFINGQANVEGWEPSSNNANTGIGGHGSCCSEMDIWEANSISEALTPHPCTTVGQEICEGDGCGGTYSDNRYGGTCDPDGCDWNPYRLGNTSFYGPGSSFTLDTTKKLTVVTQFETSGAINRYYVQNGVTFQQPNAELGSYSGNELNDDYCTAEEAEFGGSSFSDKGGLTQFKKATSGGMVLVMSLWDDYYANMLWLDSTYPTNETSSTPGAVRGSCSTSSGVPAQVESQSPNAKVTFSNIKFGPIGSTGNPSGGNPPGGNPPGTTTTRRPATTTGSSPGPTQSHYGQCGGIGYSGPTVCASGTTCQVLNPYYSQCL

SEQ ID NO: 49 - protein, 497 aa, Trichoderma reesei
QSACTLQSETHPPLTWQKCSSGGTCTQQTGSVVIDANWRWTHATNSSTNCYDGNTWSSTLCPDNETCAKNCCLDGAAYASTYGVTTSGNSLSIGFVTQSAQKNVGARLYLMASDTTYQEFTLLGNEFSFDVDVSQLPCELNGALYFVSMDADGGVSKYPTNTAGAKYGTGYCDSQCPRDLKFINGQANVEGWEPSSNNANTGIGGHGSCCSEMDIWEANSISEALTPHPCTTVGQEICEGDGCGGTYSDNRYGGTCDPDGCDWNPYRLGNTSFYGPGSSFTLDTTKKLTVVTQFETSGAINRYYVQNGVTFQQPNAELGSYSGNELNDDYCTAEEAEFGGSSFSDKGGLTQFKKATSGGMVLVMSLWDDYYANMLWLDSTYPTNETSSTPGAVRGSCSTSSGVPAQVESQSPNAKVTFSNIKFGPIGSTGNPSGGNPPGGNPPGTTTTRRPATTTGSSPGPTQSHYGQCGGIGYSGPTVCASGTTCQVLNPYYSQCL

SEQ ID NO: 50 - protein, 497 aa, Trichoderma reesei
QSACTLQSETHPPLTWQKCSSGGTCTQQTGSVVIDANWRWTHATNSSTNCYDGNTWSSTLCPDNETCAKNCCLDGAAYASTYGVTTSGNSLSIGFVTQSAQKNVGARLYLMASDTTYQEFTLLGNEFSFDVDVSQLPCMLNGALYFVSMDADGGVSKYPTNTAGAKYGTGYCDSQCPRDLKFINGQANVEGWEPSSNNANTGIGGHGSCCSEMDIWEANSISEALTPHPCTTVGQEICEGDGCGGTYSDNRYGGTCDPDGCDWNPYRLGNTSFYGPGSSFTLDTTKKLTVVTQFETSGAINRYYVQNGVTFQQPNAELGSYSGNELNDDYCTAEEAEFGGSSFSDKGGLTQFKKATSGGMVLVMSLWDDYYANMLWLDSTYPTNETSSTPGAVRGSCSTSSGVPAQVESQSPNAKVTFSNIKFGPIGSTGNPSGGNPPGGNPPGTTTTRRPATTTGSSPGPTQSHYGQCGGIGYSGPTVCASGTTCQVLNPYYSQCL

SEQ ID NO: 51 - protein, 497 aa, Trichoderma reesei
QSACTLQSETHPPLTWQKCSSGGTCTQQTGSVVIDANWRWTHATNSSTNCYDGNTWSSTLCPDNETCAKNCCLDGAAYASTYGVTTSGNSLSIGFVTQSAQKNVGARLYLMASDTTYQEFTLLGNEFSFDVDVSQLPCQLNGALYFVSMDADGGVSKYPTNTAGAKYGTGYCDSQCPRDLKFINGQANVEGWEPSSNNANTGIGGHGSCCSEMDIWEANSISEALTPHPCTTVGQEICEGDGCGGTYSDNRYGGTCDPDGCDWNPYRLGNTSFYGPGSSFTLDTTKKLTVVTQFETSGAINRYYVQNGVTFQQPNAELGSYSGNELNDDYCTAEEAEFGGSSFSDKGGLTQFKKATSGGMVLVMSLWDDYYANMLWLDSTYPTNETSSTPGAVRGSCSTSSGVPAQVESQSPNAKVTFSNIKFGPIGSTGNPSGGNPPGGNPPGTTTTRRPATTTGSSPGPTQSHYGQCGGIGYSGPTVCASGTTCQVLNPYYSQCL

SEQ ID NO: 52 - protein, 497 aa, Trichoderma reesei
QSACTLQSETHPPLTWQKCSSGGTCTQQTGSVVIDANWRWTHATNSSTNCYDGNTWSSTLCPDNETCAKNCCLDGAAYASTYGVTTSGNSLSIGFVTQSAQKNVGARLYLMASDTTYQEFTLLGNEFSFDVDVSQLPCRLNGALYFVSMDADGGVSKYPTNTAGAKYGTGYCDSQCPRDLKFINGQANVEGWEPSSNNANTGIGGHGSCCSEMDIWEANSISEALTPHPCTTVGQEICEGDGCGGTYSDNRYGGTCDPDGCDWNPYRLGNTSFYGPGSSFTLDTTKKLTVVTQFETSGAINRYYVQNGVTFQQPNAELGSYSGNELNDDYCTAEEAEFGGSSFSDKGGLTQFKKATSGGMVLVMSLWDDYYANMLWLDSTYPTNETSSTPGAVRGSCSTSSGVPAQVESQSPNAKVTFSNIKFGPIGSTGNPSGGNPPGGNPPGTTTTRRPATTTGSSPGPTQSHYGQCGGIGYSGPTVCASGTTCQVLNPYYSQCL

SEQ ID NO: 53 - protein, 497 aa, Trichoderma reesei
QSACTLQSETHPPLTWQKCSSGGTCTQQTGSVVIDANWRWTHATNSSTNCYDGNTWSSTLCPDNETCAKNCCLDGAAYASTYGVTTSGNSLSIGFVTQSAQKNVGARLYLMASDTTYQEFTLLGNEFSFDVDVSQLPCSLNGALYFVSMDADGGVSKYPTNTAGAKYGTGYCDSQCPRDLKFINGQANVEGWEPSSNNANTGIGGHGSCCSEMDIWEANSISEALTPHPCTTVGQEICEGDGCGGTYSDNRYGGTCDPDGCDWNPYRLGNTSFYGPGSSFTLDTTKKLTVVTQFETSGAINRYYVQNGVTFQQPNAELGSYSGNELNDDYCTAEEAEFGGSSFSDKGGLTQFKKATSGGMVLVMSLWDDYYANMLWLDSTYPTNETSSTPGAVRGSCSTSSGVPAQVESQSPNAKVTFSNIKFGPIGSTGNPSGGNPPGGNPPGTTTTRRPATTTGSSPGPTQSHYGQCGGIGYSGPTVCASGTTCQVLNPYYSQCL

SEQ ID NO: 54 - protein, 497 aa, Trichoderma reesei
QSACTLQSETHPPLTWQKCSSGGTCTQQTGSVVIDANWRWTHATNSSTNCYDGNTWSSTLCPDNETCAKNCCLDGAAYASTYGVTTSGNSLSIGFVTQSAQKNVGARLYLMASDTTYQEFTLLGNEFSFDVDVSQLPCGLNGGLYFVSMDADGGVSKYPTNTAGAKYGTGYCDSQCPRDLKFINGQANVEGWEPSSNNANTGIGGHGSCCSEMDIWEANSISEALTPHPCTTVGQEICEGDGCGGTYSDNRYGGTCDPDGCDWNPYRLGNTSFYGPGSSFTLDTTKKLTVVTQFETSGAINRYYVQNGVTFQQPNAELGSYSGNELNDDYCTAEEAEFGGSSFSDKGGLTQFKKATSGGMVLVMSLWDDYYANMLWLDSTYPTNETSSTPGAVRGSCSTSSGVPAQVESQSPNAKVTFSNIKFGPIGSTGNPSGGNPPGGNPPGTTTTRRPATTTGSSPGPTQSHYGQCGGIGYSGPTVCASGTTCQVLNPYYSQCL

SEQ ID NO: 55 - protein, 497 aa, Trichoderma reesei
QSACTLQSETHPPLTWQKCSSGGTCTQQTGSVVIDANWRWTHATNSSTNCYDGNTWSSTLCPDNETCAKNCCLDGAAYASTYGVTTSGNSLSIGFVTQSAQKNVGARLYLMASDTTYQEFTLLGNEFSFDVDVSQLPCGLNGLLYFVSMDADGGVSKYPTNTAGAKYGTGYCDSQCPRDLKFINGQANVEGWEPSSNNANTGIGGHGSCCSEMDIWEANSISEALTPHPCTTVGQEICEGDGCGGTYSDNRYGGTCDPDGCDWNPYRLGNTSFYGPGSSFTLDTTKKLTVVTQFETSGAINRYYVQNGVTFQQPNAELGSYSGNELNDDYCTAEEAEFGGSSFSDKGGLTQFKKATSGGMVLVMSLWDDYYANMLWLDSTYPTNETSSTPGAVRGSCSTSSGVPAQVESQSPNAKVTFSNIKFGPIGSTGNPSGGNPPGGNPPGTTTTRRPATTTGSSPGPTQSHYGQCGGIGYSGPTVCASGTTCQVLNPYYSQCL

SEQ ID NO: 56 - protein, 497 aa, Trichoderma reesei
QSACTLQSETHPPLTWQKCSSGGTCTQQTGSVVIDANWRWTHATNSSTNCYDGNTWSSTLCPDNETCAKNCCLDGAAYASTYGVTTSGNSLSIGFVTQSAQKNVGARLYLMASDTTYQEFTLLGNEFSFDVDVSQLPCGLNGAAYFVSMDADGGVSKYPTNTAGAKYGTGYCDSQCPRDLKFINGQANVEGWEPSSNNANTGIGGHGSCCSEMDIWEANSISEALTPHPCTTVGQEICEGDGCGGTYSDNRYGGTCDPDGCDWNPYRLGNTSFYGPGSSFTLDTTKKLTVVTQFETSGAINRYYVQNGVTFQQPNAELGSYSGNELNDDYCTAEEAEFGGSSFSDKGGLTQFKKATSGGMVLVMSLWDDYYANMLWLDSTYPTNETSSTPGAVRGSCSTSSGVPAQVESQSPNAKVTFSNIKFGPIGSTGNPSGGNPPGGNPPGTTTTRRPATTTGSSPGPTQSHYGQCGGIGYSGPTVCASGTTCQVLNPYYSQCL

SEQ ID NO: 57 - protein, 497 aa, Trichoderma reesei
QSACTLQSETHPPLTWQKCSSGGTCTQQTGSVVIDANWRWTHATNSSTNCYDGNTWSSTLCPDNETCAKNCCLDGAAYASTYGVTTSGNSLSIGFVTQSAQKNVGARLYLMASDTTYQEFTLLGNEFSFDVDVSQLPCGLNGAVYFVSMDADGGVSKYPTNTAGAKYGTGYCDSQCPRDLKFINGQANVEGWEPSSNNANTGIGGHGSCCSEMDIWEANSISEALTPHPCTTVGQEICEGDGCGGTYSDNRYGGTCDPDGCDWNPYRLGNTSFYGPGSSFTLDTTKKLTVVTQFETSGAINRYYVQNGVTFQQPNAELGSYSGNELNDDYCTAEEAEFGGSSFSDKGGLTQFKKATSGGMVLVMSLWDDYYANMLWLDSTYPTNETSSTPGAVRGSCSTSSGVPAQVESQSPNAKVTFSNIKFGPIGSTGNPSGGNPPGGNPPGTTTTRRPATTTGSSPGPTQSHYGQCGGIGYSGPTVCASGTTCQVLNPYYSQCL

SEQ ID NO: 58 - protein, 497 aa, Trichoderma reesei
QSACTLQSETHPPLTWQKCSSGGTCTQQTGSVVIDANWRWTHATNSSTNCYDGNTWSSTLCPDNETCAKNCCLDGAAYASTYGVTTSGNSLSIGFVTQSAQKNVGARLYLMASDTTYQEFTLLGNEFSFDVDVSQLPCGLNGALYFVSMNADGGVSKYPTNTAGAKYGTGYCDSQCPRDLKFINGQANVEGWEPSSNNANTGIGGHGSCCSEMDIWEANSISEALTPHPCTTVGQEICEGDGCGGTYSDNRYGGTCDPDGCDWNPYRLGNTSFYGPGSSFTLDTTKKLTVVTQFETSGAINRYYVQNGVTFQQPNAELGSYSGNELNDDYCTAEEAEFGGSSFSDKGGLTQFKKATSGGMVLVMSLWDDYYANMLWLDSTYPTNETSSTPGAVRGSCSTSSGVPAQVESQSPNAKVTFSNIKFGPIGSTGNPSGGNPPGGNPPGTTTTRRPATTTGSSPGPTQSHYGQCGGIGYSGPTVCASGTTCQVLNPYYSQCL

SEQ ID NO: 59 - protein, 497 aa, Trichoderma reesei
QSACTLQSETHPPLTWQKCSSGGTCTQQTGSVVIDANWRWTHATNSSTNCYDGNTWSSTLCPDNETCAKNCCLDGAAYASTYGVTTSGNSLSIGFVTQSAQKNVGARLYLMASDTTYQEFTLLGNEFSFDVDVSQLPCGLNGALYFVSMDADGGMSKYPTNTAGAKYGTGYCDSQCPRDLKFINGQANVEGWEPSSNNANTGIGGHGSCCSEMDIWEANSISEALTPHPCTTVGQEICEGDGCGGTYSDNRYGGTCDPDGCDWNPYRLGNTSFYGPGSSFTLDTTKKLTVVTQFETSGAINRYYVQNGVTFQQPNAELGSYSGNELNDDYCTAEEAEFGGSSFSDKGGLTQFKKATSGGMVLVMSLWDDYYANMLWLDSTYPTNETSSTPGAVRGSCSTSSGVPAQVESQSPNAKVTFSNIKFGPIGSTGNPSGGNPPGGNPPGTTTTRRPATTTGSSPGPTQSHYGQCGGIGYSGPTVCASGTTCQVLNPYYSQCL

SEQ ID NO: 60 - protein, 497 aa, Trichoderma reesei
QSACTLQSETHPPLTWQKCSSGGTCTQQTGSVVIDANWRWTHATNSSTNCYDGNTWSSTLCPDNETCAKNCCLDGAAYASTYGVTTSGNSLSIGFVTQSAQKNVGARLYLMASDTTYQEFTLLGNEFSFDVDVSQLPCGLNGALYFVSMDADGGVGKYPTNTAGAKYGTGYCDSQCPRDLKFINGQANVEGWEPSSNNANTGIGGHGSCCSEMDIWEANSISEALTPHPCTTVGQEICEGDGCGGTYSDNRYGGTCDPDGCDWNPYRLGNTSFYGPGSSFTLDTTKKLTVVTQFETSGAINRYYVQNGVTFQQPNAELGSYSGNELNDDYCTAEEAEFGGSSFSDKGGLTQFKKATSGGMVLVMSLWDDYYANMLWLDSTYPTNETSSTPGAVRGSCSTSSGVPAQVESQSPNAKVTFSNIKFGPIGSTGNPSGGNPPGGNPPGTTTTRRPATTTGSSPGPTQSHYGQCGGIGYSGPTVCASGTTCQVLNPYYSQCL

SEQ ID NO: 61 - protein, 497 aa, Trichoderma reesei
QSACTLQSETHPPLTWQKCSSGGTCTQQTGSVVIDANWRWTHATNSSTNCYDGNTWSSTLCPDNETCAKNCCLDGAAYASTYGVTTSGNSLSIGFVTQSAQKNVGARLYLMASDTTYQEFTLLGNEFSFDVDVSQLPCGLNGALYFVSMDADGGVSKYPTNTAGAKYGTGYCDSQCPRDLLFINGQANVEGWEPSSNNANTGIGGHGSCCSEMDIWEANSISEALTPHPCTTVGQEICEGDGCGGTYSDNRYGGTCDPDGCDWNPYRLGNTSFYGPGSSFTLDTTKKLTVVTQFETSGAINRYYVQNGVTFQQPNAELGSYSGNELNDDYCTAEEAEFGGSSFSDKGGLTQFKKATSGGMVLVMSLWDDYYANMLWLDSTYPTNETSSTPGAVRGSCSTSSGVPAQVESQSPNAKVTFSNIKFGPIGSTGNPSGGNPPGGNPPGTTTTRRPATTTGSSPGPTQSHYGQCGGIGYSGPTVCASGTTCQVLNPYYSQCL

SEQ ID NO: 62 - protein, 497 aa, Trichoderma reesei
QSACTLQSETHPPLTWQKCSSGGTCTQQTGSVVIDANWRWTHATNSSTNCYDGNTWSSTLCPDNETCAKNCCLDGAAYASTYGVTTSGNSLSIGFVTQSAQKNVGARLYLMASDTTYQEFTLLGNEFSFDVDVSQLPCGLNGALYFVSMDADGGVSKYPTNTAGAKYGTGYCDSQCPRDLKFNNGQANVEGWEPSSNNANTGIGGHGSCCSEMDIWEANSISEALTPHPCTTVGQEICEGDGCGGTYSDNRYGGTCDPDGCDWNPYRLGNTSFYGPGSSFTLDTTKKLTVVTQFETSGAINRYYVQNGVTFQQPNAELGSYSGNELNDDYCTAEEAEFGGSSFSDKGGLTQFKKATSGGMVLVMSLWDDYYANMLWLDSTYPTNETSSTPGAVRGSCSTSSGVPAQVESQSPNAKVTFSNIKFGPIGSTGNPSGGNPPGGNPPGTTTTRRPATTTGSSPGPTQSHYGQCGGIGYSGPTVCASGTTCQVLNPYYSQCL

SEQ ID NO: 63 - protein, 497 aa, Trichoderma reesei
QSACTLQSETHPPLTWQKCSSGGTCTQQTGSVVIDANWRWTHATNSSTNCYDGNTWSSTLCPDNETCAKNCCLDGAAYASTYGVTTSGNSLSIGFVTQSAQKNVGARLYLMASDTTYQEFTLLGNEFSFDVDVSQLPCGLNGALYFVSMDADGGVSKYPTNTAGAKYGTGYCDSQCPRDLKFISGQANVEGWEPSSNNANTGIGGHGSCCSEMDIWEANSISEALTPHPCTTVGQEICEGDGCGGTYSDNRYGGTCDPDGCDWNPYRLGNTSFYGPGSSFTLDTTKKLTVVTQFETSGAINRYYVQNGVTFQQPNAELGSYSGNELNDDYCTAEEAEFGGSSFSDKGGLTQFKKATSGGMVLVMSLWDDYYANMLWLDSTYPTNETSSTPGAVRGSCSTSSGVPAQVESQSPNAKVTFSNIKFGPIGSTGNPSGGNPPGGNPPGTTTTRRPATTTGSSPGPTQSHYGQCGGIGYSGPTVCASGTTCQVLNPYYSQCL

SEQ ID NO: 64 - protein, 497 aa, Trichoderma reesei
QSACTLQSETHPPLTWQKCSSGGTCTQQTGSVVIDANWRWTHATNSSTNCYDGNTWSSTLCPDNETCAKNCCLDGAAYASTYGVTTSGNSLSIGFVTQSAQKNVGARLYLMASDTTYQEFTLLGNEFSFDVDVSQLPCGLNGALYFVSMDADGGVSKYPTNTAGAKYGTGYCDSQCPRDLKFINGKANVEGWEPSSNNANTGIGGHGSCCSEMDIWEANSISEALTPHPCTTVGQEICEGDGCGGTYSDNRYGGTCDPDGCDWNPYRLGNTSFYGPGSSFTLDTTKKLTVVTQFETSGAINRYYVQNGVTFQQPNAELGSYSGNELNDDYCTAEEAEFGGSSFSDKGGLTQFKKATSGGMVLVMSLWDDYYANMLWLDSTYPTNETSSTPGAVRGSCSTSSGVPAQVESQSPNAKVTFSNIKFGPIGSTGNPSGGNPPGGNPPGTTTTRRPATTTGSSPGPTQSHYGQCGGIGYSGPTVCASGTTCQVLNPYYSQCL

SEQ ID NO: 65 - protein, 497 aa, Trichoderma reesei
QSACTLQSETHPPLTWQKCSSGGTCTQQTGSVVIDANWRWTHATNSSTNCYDGNTWSSTLCPDNETCAKNCCLDGAAYASTYGVTTSGNSLSIGFVTQSAQKNVGARLYLMASDTTYQEFTLLGNEFSFDVDVSQLPCGLNGALYFVSMDADGGVSKYPTNTAGAKYGTGYCDSQCPRDLKFINGQANVEGWGPSSNNANTGIGGHGSCCSEMDIWEANSISEALTPHPCTTVGQEICEGDGCGGTYSDNRYGGTCDPDGCDWNPYRLGNTSFYGPGSSFTLDTTKKLTVVTQFETSGAINRYYVQNGVTFQQPNAELGSYSGNELNDDYCTAEEAEFGGSSFSDKGGLTQFKKATSGGMVLVMSLWDDYYANMLWLDSTYPTNETSSTPGAVRGSCSTSSGVPAQVESQSPNAKVTFSNIKFGPIGSTGNPSGGNPPGGNPPGTTTTRRPATTTGSSPGPTQSHYGQCGGIGYSGPTVCASGTTCQVLNPYYSQCL

SEQ ID NO: 66 - protein, 497 aa, Trichoderma reesei
QSACTLQSETHPPLTWQKCSSGGTCTQQTGSVVIDANWRWTHATNSSTNCYDGNTWSSTLCPDNETCAKNCCLDGAAYASTYGVTTSGNSLSIGFVTQSAQKNVGARLYLMASDTTYQEFTLLGNEFSFDVDVSQLPCGLNGALYFVSMDADGGVSKYPTNTAGAKYGTGYCDSQCPRDLKFINGQANVEGWEQSSNNANTGIGGHGSCCSEMDIWEANSISEALTPHPCTTVGQEICEGDGCGGTYSDNRYGGTCDPDGCDWNPYRLGNTSFYGPGSSFTLDTTKKLTVVTQFETSGAINRYYVQNGVTFQQPNAELGSYSGNELNDDYCTAEEAEFGGSSFSDKGGLTQFKKATSGGMVLVMSLWDDYYANMLWLDSTYPTNETSSTPGAVRGSCSTSSGVPAQVESQSPNAKVTFSNIKFGPIGSTGNPSGGNPPGGNPPGTTTTRRPATTTGSSPGPTQSHYGQCGGIGYSGPTVCASGTTCQVLNPYYSQCL

SEQ ID NO: 67 - protein, 497 aa, Trichoderma reesei
QSACTLQSETHPPLTWQKCSSGGTCTQQTGSVVIDANWRWTHATNSSTNCYDGNTWSSTLCPDNETCAKNCCLDGAAYASTYGVTTSGNSLSIGFVTQSAQKNVGARLYLMASDTTYQEFTLLGNEFSFDVDVSQLPCGLNGALYFVSMDADGGVSKYPTNTAGAKYGTGYCDSQCPRDLKFINGQANVEGWEPSSANANTGIGGHGSCCSEMDIWEANSISEALTPHPCTTVGQEICEGDGCGGTYSDNRYGGTCDPDGCDWNPYRLGNTSFYGPGSSFTLDTTKKLTVVTQFETSGAINRYYVQNGVTFQQPNAELGSYSGNELNDDYCTAEEAEFGGSSFSDKGGLTQFKKATSGGMVLVMSLWDDYYANMLWLDSTYPTNETSSTPGAVRGSCSTSSGVPAQVESQSPNAKVTFSNIKFGPIGSTGNPSGGNPPGGNPPGTTTTRRPATTTGSSPGPTQSHYGQCGGIGYSGPTVCASGTTCQVLNPYYSQCL

SEQ ID NO: 68 - protein, 497 aa, Trichoderma reesei
QSACTLQSETHPPLTWQKCSSGGTCTQQTGSVVIDANWRWTHATNSSTNCYDGNTWSSTLCPDNETCAKNCCLDGAAYASTYGVTTSGNSLSIGFVTQSAQKNVGARLYLMASDTTYQEFTLLGNEFSFDVDVSQLPCGLNGALYFVSMDADGGVSKYPTNTAGAKYGTGYCDSQCPRDLKFINGQANVEGWEPSSLNANTGIGGHGSCCSEMDIWEANSISEALTPHPCTTVGQEICEGDGCGGTYSDNRYGGTCDPDGCDWNPYRLGNTSFYGPGSSFTLDTTKKLTVVTQFETSGAINRYYVQNGVTFQQPNAELGSYSGNELNDDYCTAEEAEFGGSSFSDKGGLTQFKKATSGGMVLVMSLWDDYYANMLWLDSTYPTNETSSTPGAVRGSCSTSSGVPAQVESQSPNAKVTFSNIKFGPIGSTGNPSGGNPPGGNPPGTTTTRRPATTTGSSPGPTQSHYGQCGGIGYSGPTVCASGTTCQVLNPYYSQCL

SEQ ID NO: 69 - protein, 497 aa, Trichoderma reesei
QSACTLQSETHPPLTWQKCSSGGTCTQQTGSVVIDANWRWTHATNSSTNCYDGNTWSSTLCPDNETCAKNCCLDGAAYASTYGVTTSGNSLSIGFVTQSAQKNVGARLYLMASDTTYQEFTLLGNEFSFDVDVSQLPCGLNGALYFVSMDADGGVSKYPTNTAGAKYGTGYCDSQCPRDLKFINGQANVEGWEPSSQNANTGIGGHGSCCSEMDIWEANSISEALTPHPCTTVGQEICEGDGCGGTYSDNRYGGTCDPDGCDWNPYRLGNTSFYGPGSSFTLDTTKKLTVVTQFETSGAINRYYVQNGVTFQQPNAELGSYSGNELNDDYCTAEEAEFGGSSFSDKGGLTQFKKATSGGMVLVMSLWDDYYANMLWLDSTYPTNETSSTPGAVRGSCSTSSGVPAQVESQSPNAKVTFSNIKFGPIGSTGNPSGGNPPGGNPPGTTTTRRPATTTGSSPGPTQSHYGQCGGIGYSGPTVCASGTTCQVLNPYYSQCL

SEQ ID NO: 70 - protein, 497 aa, Trichoderma reesei
QSACTLQSETHPPLTWQKCSSGGTCTQQTGSVVIDANWRWTHATNSSTNCYDGNTWSSTLCPDNETCAKNCCLDGAAYASTYGVTTSGNSLSIGFVTQSAQKNVGARLYLMASDTTYQEFTLLGNEFSFDVDVSQLPCGLNGALYFVSMDADGGVSKYPTNTAGAKYGTGYCDSQCPRDLKFINGQANVEGWEPSSVNANTGIGGHGSCCSEMDIWEANSISEALTPHPCTTVGQEICEGDGCGGTYSDNRYGGTCDPDGCDWNPYRLGNTSFYGPGSSFTLDTTKKLTVVTQFETSGAINRYYVQNGVTFQQPNAELGSYSGNELNDDYCTAEEAEFGGSSFSDKGGLTQFKKATSGGMVLVMSLWDDYYANMLWLDSTYPTNETSSTPGAVRGSCSTSSGVPAQVESQSPNAKVTFSNIKFGPIGSTGNPSGGNPPGGNPPGTTTTRRPATTTGSSPGPTQSHYGQCGGIGYSGPTVCASGTTCQVLNPYYSQCL

SEQ ID NO: 71 - protein, 497 aa, Trichoderma reesei
QSACTLQSETHPPLTWQKCSSGGTCTQQTGSVVIDANWRWTHATNSSTNCYDGNTWSSTLCPDNETCAKNCCLDGAAYASTYGVTTSGNSLSIGFVTQSAQKNVGARLYLMASDTTYQEFTLLGNEFSFDVDVSQLPCGLNGALYFVSMDADGGVSKYPTNTAGAKYGTGYCDSQCPRDLKFINGQANVEGWEPSSWNANTGIGGHGSCCSEMDIWEANSISEALTPHPCTTVGQEICEGDGCGGTYSDNRYGGTCDPDGCDWNPYRLGNTSFYGPGSSFTLDTTKKLTVVTQFETSGAINRYYVQNGVTFQQPNAELGSYSGNELNDDYCTAEEAEFGGSSFSDKGGLTQFKKATSGGMVLVMSLWDDYYANMLWLDSTYPTNETSSTPGAVRGSCSTSSGVPAQVESQSPNAKVTFSNIKFGPIGSTGNPSGGNPPGGNPPGTTTTRRPATTTGSSPGPTQSHYGQCGGIGYSGPTVCASGTTCQVLNPYYSQCL

SEQ ID NO: 72 - protein, 497 aa, Trichoderma reesei
QSACTLQSETHPPLTWQKCSSGGTCTQQTGSVVIDANWRWTHATNSSTNCYDGNTWSSTLCPDNETCAKNCCLDGAAYASTYGVTTSGNSLSIGFVTQSAQKNVGARLYLMASDTTYQEFTLLGNEFSFDVDVSQLPCGLNGALYFVSMDADGGVSKYPTNTAGAKYGTGYCDSQCPRDLKFINGQANVEGWEPSSNNACTGIGGHGSCCSEMDIWEANSISEALTPHPCTTVGQEICEGDGCGGTYSDNRYGGTCDPDGCDWNPYRLGNTSFYGPGSSFTLDTTKKLTVVTQFETSGAINRYYVQNGVTFQQPNAELGSYSGNELNDDYCTAEEAEFGGSSFSDKGGLTQFKKATSGGMVLVMSLWDDYYANMLWLDSTYPTNETSSTPGAVRGSCSTSSGVPAQVESQSPNAKVTFSNIKFGPIGSTGNPSGGNPPGGNPPGTTTTRRPATTTGSSPGPTQSHYGQCGGIGYSGPTVCASGTTCQVLNPYYSQCL

SEQ ID NO: 73 - protein, 497 aa, Trichoderma reesei
QSACTLQSETHPPLTWQKCSSGGTCTQQTGSVVIDANWRWTHATNSSTNCYDGNTWSSTLCPDNETCAKNCCLDGAAYASTYGVTTSGNSLSIGFVTQSAQKNVGARLYLMASDTTYQEFTLLGNEFSFDVDVSQLPCGLNGALYFVSMDADGGVSKYPTNTAGAKYGTGYCDSQCPRDLKFINGQANVEGWEPSSNNAFTGIGGHGSCCSEMDIWEANSISEALTPHPCTTVGQEICEGDGCGGTYSDNRYGGTCDPDGCDWNPYRLGNTSFYGPGSSFTLDTTKKLTVVTQFETSGAINRYYVQNGVTFQQPNAELGSYSGNELNDDYCTAEEAEFGGSSFSDKGGLTQFKKATSGGMVLVMSLWDDYYANMLWLDSTYPTNETSSTPGAVRGSCSTSSGVPAQVESQSPNAKVTFSNIKFGPIGSTGNPSGGNPPGGNPPGTTTTRRPATTTGSSPGPTQSHYGQCGGIGYSGPTVCASGTTCQVLNPYYSQCL

SEQ ID NO: 74 - protein, 497 aa, Trichoderma reesei
QSACTLQSETHPPLTWQKCSSGGTCTQQTGSVVIDANWRWTHATNSSTNCYDGNTWSSTLCPDNETCAKNCCLDGAAYASTYGVTTSGNSLSIGFVTQSAQKNVGARLYLMASDTTYQEFTLLGNEFSFDVDVSQLPCGLNGALYFVSMDADGGVSKYPTNTAGAKYGTGYCDSQCPRDLKFINGQANVEGWEPSSNNANTGIGGHGSSCSEMDIWEANSISEALTPHPCTTVGQEICEGDGCGGTYSDNRYGGTCDPDGCDWNPYRLGNTSFYGPGSSFTLDTTKKLTVVTQFETSGAINRYYVQNGVTFQQPNAELGSYSGNELNDDYCTAEEAEFGGSSFSDKGGLTQFKKATSGGMVLVMSLWDDYYANMLWLDSTYPTNETSSTPGAVRGSCSTSSGVPAQVESQSPNAKVTFSNIKFGPIGSTGNPSGGNPPGGNPPGTTTTRRPATTTGSSPGPTQSHYGQCGGIGYSGPTVCASGTTCQVLNPYYSQCL

SEQ ID NO: 75 - protein, 497 aa, Trichoderma reesei
QSACTLQSETHPPLTWQKCSSGGTCTQQTGSVVIDANWRWTHATNSSTNCYDGNTWSSTLCPDNETCAKNCCLDGAAYASTYGVTTSGNSLSIGFVTQSAQKNVGARLYLMASDTTYQEFTLLGNEFSFDVDVSQLPCGLNGALYFVSMDADGGVSKYPTNTAGAKYGTGYCDSQCPRDLKFINGQANVEGWEPSSNNANTGIGGHGSCCTEMDIWEANSISEALTPHPCTTVGQEICEGDGCGGTYSDNRYGGTCDPDGCDWNPYRLGNTSFYGPGSSFTLDTTKKLTVVTQFETSGAINRYYVQNGVTFQQPNAELGSYSGNELNDDYCTAEEAEFGGSSFSDKGGLTQFKKATSGGMVLVMSLWDDYYANMLWLDSTYPTNETSSTPGAVRGSCSTSSGVPAQVESQSPNAKVTFSNIKFGPIGSTGNPSGGNPPGGNPPGTTTTRRPATTTGSSPGPTQSHYGQCGGIGYSGPTVCASGTTCQVLNPYYSQCL

SEQ ID NO: 76 - protein, 497 aa, Trichoderma reesei
QSACTLQSETHPPLTWQKCSSGGTCTQQTGSVVIDANWRWTHATNSSTNCYDGNTWSSTLCPDNETCAKNCCLDGAAYASTYGVTTSGNSLSIGFVTQSAQKNVGARLYLMASDTTYQEFTLLGNEFSFDVDVSQLPCGLNGALYFVSMDADGGVSKYPTNTAGAKYGTGYCDSQCPRDLKFINGQANVEGWEPSSNNANTGIGGHGSCCSEIDIWEANSISEALTPHPCTTVGQEICEGDGCGGTYSDNRYGGTCDPDGCDWNPYRLGNTSFYGPGSSFTLDTTKKLTVVTQFETSGAINRYYVQNGVTFQQPNAELGSYSGNELNDDYCTAEEAEFGGSSFSDKGGLTQFKKATSGGMVLVMSLWDDYYANMLWLDSTYPTNETSSTPGAVRGSCSTSSGVPAQVESQSPNAKVTFSNIKFGPIGSTGNPSGGNPPGGNPPGTTTTRRPATTTGSSPGPTQSHYGQCGGIGYSGPTVCASGTTCQVLNPYYSQCL

SEQ ID NO: 77 - protein, 497 aa, Trichoderma reesei
QSACTLQSETHPPLTWQKCSSGGTCTQQTGSVVIDANWRWTHATNSSTNCYDGNTWSSTLCPDNETCAKNCCLDGAAYASTYGVTTSGNSLSIGFVTQSAQKNVGARLYLMASDTTYQEFTLLGNEFSFDVDVSQLPCGLNGALYFVSMDADGGVSKYPTNTAGAKYGTGYCDSQCPRDLKFINGQANVEGWEPSSNNANTGIGGHGSCCSEMDIWEASSISEALTPHPCTTVGQEICEGDGCGGTYSDNRYGGTCDPDGCDWNPYRLGNTSFYGPGSSFTLDTTKKLTVVTQFETSGAINRYYVQNGVTFQQPNAELGSYSGNELNDDYCTAEEAEFGGSSFSDKGGLTQFKKATSGGMVLVMSLWDDYYANMLWLDSTYPTNETSSTPGAVRGSCSTSSGVPAQVESQSPNAKVTFSNIKFGPIGSTGNPSGGNPPGGNPPGTTTTRRPATTTGSSPGPTQSHYGQCGGIGYSGPTVCASGTTCQVLNPYYSQCL

SEQ ID NO: 78 - protein, 497 aa, Trichoderma reesei
QSACTLQSETHPPLTWQKCSSGGTCTQQTGSVVIDANWRWTHATNSSTNCYDGNTWSSTLCPDNETCAKNCCLDGAAYASTYGVTTSGNSLSIGFVTQSAQKNVGARLYLMASDTTYQEFTLLGNEFSFDVDVSQLPCGLNGALYFVSMDADGGVSKYPTNTAGAKYGTGYCDSQCPRDLKFINGQANVEGWEPSSNNANTGIGGHGSCCSEMDIWEANSISEALTPHPCTTVGQETCEGDGCGGTYSDNRYGGTCDPDGCDWNPYRLGNTSFYGPGSSFTLDTTKKLTVVTQFETSGAINRYYVQNGVTFQQPNAELGSYSGNELNDDYCTAEEAEFGGSSFSDKGGLTQFKKATSGGMVLVMSLWDDYYANMLWLDSTYPTNETSSTPGAVRGSCSTSSGVPAQVESQSPNAKVTFSNIKFGPIGSTGNPSGGNPPGGNPPGTTTTRRPATTTGSSPGPTQSHYGQCGGIGYSGPTVCASGTTCQVLNPYYSQCL

SEQ ID NO: 79 - protein, 497 aa, Trichoderma reesei
QSACTLQSETHPPLTWQKCSSGGTCTQQTGSVVIDANWRWTHATNSSTNCYDGNTWSSTLCPDNETCAKNCCLDGAAYASTYGVTTSGNSLSIGFVTQSAQKNVGARLYLMASDTTYQEFTLLGNEFSFDVDVSQLPCGLNGALYFVSMDADGGVSKYPTNTAGAKYGTGYCDSQCPRDLKFINGQANVEGWEPSSNNANTGIGGHGSCCSEMDIWEANSISEALTPHPCTTVGQEICEGLGCGGTYSDNRYGGTCDPDGCDWNPYRLGNTSFYGPGSSFTLDTTKKLTVVTQFETSGAINRYYVQNGVTFQQPNAELGSYSGNELNDDYCTAEEAEFGGSSFSDKGGLTQFKKATSGGMVLVMSLWDDYYANMLWLDSTYPTNETSSTPGAVRGSCSTSSGVPAQVESQSPNAKVTFSNIKFGPIGSTGNPSGGNPPGGNPPGTTTTRRPATTTGSSPGPTQSHYGQCGGIGYSGPTVCASGTTCQVLNPYYSQCL

SEQ ID NO: 80 - protein, 497 aa, Trichoderma reesei
QSACTLQSETHPPLTWQKCSSGGTCTQQTGSVVIDANWRWTHATNSSTNCYDGNTWSSTLCPDNETCAKNCCLDGAAYASTYGVTTSGNSLSIGFVTQSAQKNVGARLYLMASDTTYQEFTLLGNEFSFDVDVSQLPCGLNGALYFVSMDADGGVSKYPTNTAGAKYGTGYCDSQCPRDLKFINGQANVEGWEPSSNNANTGIGGHGSCCSEMDIWEANSISEALTPHPCTTVGQEICEGRGCGGTYSDNRYGGTCDPDGCDWNPYRLGNTSFYGPGSSFTLDTTKKLTVVTQFETSGAINRYYVQNGVTFQQPNAELGSYSGNELNDDYCTAEEAEFGGSSFSDKGGLTQFKKATSGGMVLVMSLWDDYYANMLWLDSTYPTNETSSTPGAVRGSCSTSSGVPAQVESQSPNAKVTFSNIKFGPIGSTGNPSGGNPPGGNPPGTTTTRRPATTTGSSPGPTQSHYGQCGGIGYSGPTVCASGTTCQVLNPYYSQCL

SEQ ID NO: 81 - protein, 497 aa, Trichoderma reesei
QSACTLQSETHPPLTWQKCSSGGTCTQQTGSVVIDANWRWTHATNSSTNCYDGNTWSSTLCPDNETCAKNCCLDGAAYASTYGVTTSGNSLSIGFVTQSAQKNVGARLYLMASDTTYQEFTLLGNEFSFDVDVSQLPCGLNGALYFVSMDADGGVSKYPTNTAGAKYGTGYCDSQCPRDLKFINGQANVEGWEPSSNNANTGIGGHGSCCSEMDIWEANSISEALTPHPCTTVGQEICEGVGCGGTYSDNRYGGTCDPDGCDWNPYRLGNTSFYGPGSSFTLDTTKKLTVVTQFETSGAINRYYVQNGVTFQQPNAELGSYSGNELNDDYCTAEEAEFGGSSFSDKGGLTQFKKATSGGMVLVMSLWDDYYANMLWLDSTYPTNETSSTPGAVRGSCSTSSGVPAQVESQSPNAKVTFSNIKFGPIGSTGNPSGGNPPGGNPPGTTTTRRPATTTGSSPGPTQSHYGQCGGIGYSGPTVCASGTTCQVLNPYYSQCL

SEQ ID NO: 82 - protein, 497 aa, Trichoderma reesei
QSACTLQSETHPPLTWQKCSSGGTCTQQTGSVVIDANWRWTHATNSSTNCYDGNTWSSTLCPDNETCAKNCCLDGAAYASTYGVTTSGNSLSIGFVTQSAQKNVGARLYLMASDTTYQEFTLLGNEFSFDVDVSQLPCGLNGALYFVSMDADGGVSKYPTNTAGAKYGTGYCDSQCPRDLKFINGQANVEGWEPSSNNANTGIGGHGSCCSEMDIWEANSISEALTPHPCTTVGQEICEGDGCGGSYSDNRYGGTCDPDGCDWNPYRLGNTSFYGPGSSFTLDTTKKLTVVTQFETSGAINRYYVQNGVTFQQPNAELGSYSGNELNDDYCTAEEAEFGGSSFSDKGGLTQFKKATSGGMVLVMSLWDDYYANMLWLDSTYPTNETSSTPGAVRGSCSTSSGVPAQVESQSPNAKVTFSNIKFGPIGSTGNPSGGNPPGGNPPGTTTTRRPATTTGSSPGPTQSHYGQCGGIGYSGPTVCASGTTCQVLNPYYSQCL

SEQ ID NO: 83 - protein, 497 aa, Trichoderma reesei
QSACTLQSETHPPLTWQKCSSGGTCTQQTGSVVIDANWRWTHATNSSTNCYDGNTWSSTLCPDNETCAKNCCLDGAAYASTYGVTTSGNSLSIGFVTQSAQKNVGARLYLMASDTTYQEFTLLGNEFSFDVDVSQLPCGLNGALYFVSMDADGGVSKYPTNTAGAKYGTGYCDSQCPRDLKFINGQANVEGWEPSSNNANTGIGGHGSCCSEMDIWEANSISEALTPHPCTTVGQEICEGDGCGGTYSCNRYGGTCDPDGCDWNPYRLGNTSFYGPGSSFTLDTTKKLTVVTQFETSGAINRYYVQNGVTFQQPNAELGSYSGNELNDDYCTAEEAEFGGSSFSDKGGLTQFKKATSGGMVLVMSLWDDYYANMLWLDSTYPTNETSSTPGAVRGSCSTSSGVPAQVESQSPNAKVTFSNIKFGPIGSTGNPSGGNPPGGNPPGTTTTRRPATTTGSSPGPTQSHYGQCGGIGYSGPTVCASGTTCQVLNPYYSQCL

SEQ ID NO: 84 - protein, 497 aa, Trichoderma reesei
QSACTLQSETHPPLTWQKCSSGGTCTQQTGSVVIDANWRWTHATNSSTNCYDGNTWSSTLCPDNETCAKNCCLDGAAYASTYGVTTSGNSLSIGFVTQSAQKNVGARLYLMASDTTYQEFTLLGNEFSFDVDVSQLPCGLNGALYFVSMDADGGVSKYPTNTAGAKYGTGYCDSQCPRDLKFINGQANVEGWEPSSNNANTGIGGHGSCCSEMDIWEANSISEALTPHPCTTVGQEICEGDGCGGTYSNNRYGGTCDPDGCDWNPYRLGNTSFYGPGSSFTLDTTKKLTVVTQFETSGAINRYYVQNGVTFQQPNAELGSYSGNELNDDYCTAEEAEFGGSSFSDKGGLTQFKKATSGGMVLVMSLWDDYYANMLWLDSTYPTNETSSTPGAVRGSCSTSSGVPAQVESQSPNAKVTFSNIKFGPIGSTGNPSGGNPPGGNPPGTTTTRRPATTTGSSPGPTQSHYGQCGGIGYSGPTVCASGTTCQVLNPYYSQCL

SEQ ID NO: 85 - protein, 497 aa, Trichoderma reesei
QSACTLQSETHPPLTWQKCSSGGTCTQQTGSVVIDANWRWTHATNSSTNCYDGNTWSSTLCPDNETCAKNCCLDGAAYASTYGVTTSGNSLSIGFVTQSAQKNVGARLYLMASDTTYQEFTLLGNEFSFDVDVSQLPCGLNGALYFVSMDADGGVSKYPTNTAGAKYGTGYCDSQCPRDLKFINGQANVEGWEPSSNNANTGIGGHGSCCSEMDIWEANSISEALTPHPCTTVGQEICEGDGCGGTYSDNRYDGTCDPDGCDWNPYRLGNTSFYGPGSSFTLDTTKKLTVVTQFETSGAINRYYVQNGVTFQQPNAELGSYSGNELNDDYCTAEEAEFGGSSFSDKGGLTQFKKATSGGMVLVMSLWDDYYANMLWLDSTYPTNETSSTPGAVRGSCSTSSGVPAQVESQSPNAKVTFSNIKFGPIGSTGNPSGGNPPGGNPPGTTTTRRPATTTGSSPGPTQSHYGQCGGIGYSGPTVCASGTTCQVLNPYYSQCL

SEQ ID NO: 86 - protein, 497 aa, Trichoderma reesei
QSACTLQSETHPPLTWQKCSSGGTCTQQTGSVVIDANWRWTHATNSSTNCYDGNTWSSTLCPDNETCAKNCCLDGAAYASTYGVTTSGNSLSIGFVTQSAQKNVGARLYLMASDTTYQEFTLLGNEFSFDVDVSQLPCGLNGALYFVSMDADGGVSKYPTNTAGAKYGTGYCDSQCPRDLKFINGQANVEGWEPSSNNANTGIGGHGSCCSEMDIWEANSISEALTPHPCTTVGQEICEGDGCGGTYSDNRYRGTCDPDGCDWNPYRLGNTSFYGPGSSFTLDTTKKLTVVTQFETSGAINRYYVQNGVTFQQPNAELGSYSGNELNDDYCTAEEAEFGGSSFSDKGGLTQFKKATSGGMVLVMSLWDDYYANMLWLDSTYPTNETSSTPGAVRGSCSTSSGVPAQVESQSPNAKVTFSNIKFGPIGSTGNPSGGNPPGGNPPGTTTTRRPATTTGSSPGPTQSHYGQCGGIGYSGPTVCASGTTCQVLNPYYSQCL

SEQ ID NO: 87 - protein, 497 aa, Trichoderma reesei
QSACTLQSETHPPLTWQKCSSGGTCTQQTGSVVIDANWRWTHATNSSTNCYDGNTWSSTLCPDNETCAKNCCLDGAAYASTYGVTTSGNSLSIGFVTQSAQKNVGARLYLMASDTTYQEFTLLGNEFSFDVDVSQLPCGLNGALYFVSMDADGGVSKYPTNTAGAKYGTGYCDSQCPRDLKFINGQANVEGWEPSSNNANTGIGGHGSCCSEMDIWEANSISEALTPHPCTTVGQEICEGDGCGGTYSDNRYGGTCDPDDCDWNPYRLGNTSFYGPGSSFTLDTTKKLTVVTQFETSGAINRYYVQNGVTFQQPNAELGSYSGNELNDDYCTAEEAEFGGSSFSDKGGLTQFKKATSGGMVLVMSLWDDYYANMLWLDSTYPTNETSSTPGAVRGSCSTSSGVPAQVESQSPNAKVTFSNIKFGPIGSTGNPSGGNPPGGNPPGTTTTRRPATTTGSSPGPTQSHYGQCGGIGYSGPTVCASGTTCQVLNPYYSQCL

SEQ ID NO: 88 - protein, 497 aa, Trichoderma reesei
QSACTLQSETHPPLTWQKCSSGGTCTQQTGSVVIDANWRWTHATNSSTNCYDGNTWSSTLCPDNETCAKNCCLDGAAYASTYGVTTSGNSLSIGFVTQSAQKNVGARLYLMASDTTYQEFTLLGNEFSFDVDVSQLPCGLNGALYFVSMDADGGVSKYPTNTAGAKYGTGYCDSQCPRDLKFINGQANVEGWEPSSNNANTGIGGHGSCCSEMDIWEANSISEALTPHPCTTVGQEICEGDGCGGTYSDNRYGGTCDPDGCDWCPYRLGNTSFYGPGSSFTLDTTKKLTVVTQFETSGAINRYYVQNGVTFQQPNAELGSYSGNELNDDYCTAEEAEFGGSSFSDKGGLTQFKKATSGGMVLVMSLWDDYYANMLWLDSTYPTNETSSTPGAVRGSCSTSSGVPAQVESQSPNAKVTFSNIKFGPIGSTGNPSGGNPPGGNPPGTTTTRRPATTTGSSPGPTQSHYGQCGGIGYSGPTVCASGTTCQVLNPYYSQCL

SEQ ID NO: 89 - protein, 497 aa, Trichoderma reesei
QSACTLQSETHPPLTWQKCSSGGTCTQQTGSVVIDANWRWTHATNSSTNCYDGNTWSSTLCPDNETCAKNCCLDGAAYASTYGVTTSGNSLSIGFVTQSAQKNVGARLYLMASDTTYQEFTLLGNEFSFDVDVSQLPCGLNGALYFVSMDADGGVSKYPTNTAGAKYGTGYCDSQCPRDLKFINGQANVEGWEPSSNNANTGIGGHGSCCSEMDIWEANSISEALTPHPCTTVGQEICEGDGCGGTYSDNRYGGTCDPDGCDWYPYRLGNTSFYGPGSSFTLDTTKKLTVVTQFETSGAINRYYVQNGVTFQQPNAELGSYSGNELNDDYCTAEEAEFGGSSFSDKGGLTQFKKATSGGMVLVMSLWDDYYANMLWLDSTYPTNETSSTPGAVRGSCSTSSGVPAQVESQSPNAKVTFSNIKFGPIGSTGNPSGGNPPGGNPPGTTTTRRPATTTGSSPGPTQSHYGQCGGIGYSGPTVCASGTTCQVLNPYYSQCL

SEQ ID NO: 90 - protein, 497 aa, Trichoderma reesei
QSACTLQSETHPPLTWQKCSSGGTCTQQTGSVVIDANWRWTHATNSSTNCYDGNTWSSTLCPDNETCAKNCCLDGAAYASTYGVTTSGNSLSIGFVTQSAQKNVGARLYLMASDTTYQEFTLLGNEFSFDVDVSQLPCGLNGALYFVSMDADGGVSKYPTNTAGAKYGTGYCDSQCPRDLKFINGQANVEGWEPSSNNANTGIGGHGSCCSEMDIWEANSISEALTPHPCTTVGQEICEGDGCGGTYSDNRYGGTCDPDGCDWNTYRLGNTSFYGPGSSFTLDTTKKLTVVTQFETSGAINRYYVQNGVTFQQPNAELGSYSGNELNDDYCTAEEAEFGGSSFSDKGGLTQFKKATSGGMVLVMSLWDDYYANMLWLDSTYPTNETSSTPGAVRGSCSTSSGVPAQVESQSPNAKVTFSNIKFGPIGSTGNPSGGNPPGGNPPGTTTTRRPATTTGSSPGPTQSHYGQCGGIGYSGPTVCASGTTCQVLNPYYSQCL

SEQ ID NO: 91 - protein, 497 aa, Trichoderma reesei
QSACTLQSETHPPLTWQKCSSGGTCTQQTGSVVIDANWRWTHATNSSTNCYDGNTWSSTLCPDNETCAKNCCLDGAAYASTYGVTTSGNSLSIGFVTQSAQKNVGARLYLMASDTTYQEFTLLGNEFSFDVDVSQLPCGLNGALYFVSMDADGGVSKYPTNTAGAKYGTGYCDSQCPRDLKFINGQANVEGWEPSSNNANTGIGGHGSCCSEMDIWEANSISEALTPHPCTTVGQEICEGDGCGGTYSDNRYGGTCDPDGCDWNPYRLGNISFYGPGSSFTLDTTKKLTVVTQFETSGAINRYYVQNGVTFQQPNAELGSYSGNELNDDYCTAEEAEFGGSSFSDKGGLTQFKKATSGGMVLVMSLWDDYYANMLWLDSTYPTNETSSTPGAVRGSCSTSSGVPAQVESQSPNAKVTFSNIKFGPIGSTGNPSGGNPPGGNPPGTTTTRRPATTTGSSPGPTQSHYGQCGGIGYSGPTVCASGTTCQVLNPYYSQCL

SEQ ID NO: 92 - protein, 497 aa, Trichoderma reesei
QSACTLQSETHPPLTWQKCSSGGTCTQQTGSVVIDANWRWTHATNSSTNCYDGNTWSSTLCPDNETCAKNCCLDGAAYASTYGVTTSGNSLSIGFVTQSAQKNVGARLYLMASDTTYQEFTLLGNEFSFDVDVSQLPCGLNGALYFVSMDADGGVSKYPTNTAGAKYGTGYCDSQCPRDLKFINGQANVEGWEPSSNNANTGIGGHGSCCSEMDIWEANSISEALTPHPCTTVGQEICEGDGCGGTYSDNRYGGTCDPDGCDWNPYRLGNTSFYGPGSSFALDTTKKLTVVTQFETSGAINRYYVQNGVTFQQPNAELGSYSGNELNDDYCTAEEAEFGGSSFSDKGGLTQFKKATSGGMVLVMSLWDDYYANMLWLDSTYPTNETSSTPGAVRGSCSTSSGVPAQVESQSPNAKVTFSNIKFGPIGSTGNPSGGNPPGGNPPGTTTTRRPATTTGSSPGPTQSHYGQCGGIGYSGPTVCASGTTCQVLNPYYSQCL

SEQ ID NO: 93 - protein, 497 aa, Trichoderma reesei
QSACTLQSETHPPLTWQKCSSGGTCTQQTGSVVIDANWRWTHATNSSTNCYDGNTWSSTLCPDNETCAKNCCLDGAAYASTYGVTTSGNSLSIGFVTQSAQKNVGARLYLMASDTTYQEFTLLGNEFSFDVDVSQLPCGLNGALYFVSMDADGGVSKYPTNTAGAKYGTGYCDSQCPRDLKFINGQANVEGWEPSSNNANTGIGGHGSCCSEMDIWEANSISEALTPHPCTTVGQEICEGDGCGGTYSDNRYGGTCDPDGCDWNPYRLGNTSFYGPGSSFILDTTKKLTVVTQFETSGAINRYYVQNGVTFQQPNAELGSYSGNELNDDYCTAEEAEFGGSSFSDKGGLTQFKKATSGGMVLVMSLWDDYYANMLWLDSTYPTNETSSTPGAVRGSCSTSSGVPAQVESQSPNAKVTFSNIKFGPIGSTGNPSGGNPPGGNPPGTTTTRRPATTTGSSPGPTQSHYGQCGGIGYSGPTVCASGTTCQVLNPYYSQCL

SEQ ID NO: 94 - protein, 497 aa, Trichoderma reesei
QSACTLQSETHPPLTWQKCSSGGTCTQQTGSVVIDANWRWTHATNSSTNCYDGNTWSSTLCPDNETCAKNCCLDGAAYASTYGVTTSGNSLSIGFVTQSAQKNVGARLYLMASDTTYQEFTLLGNEFSFDVDVSQLPCGLNGALYFVSMDADGGVSKYPTNTAGAKYGTGYCDSQCPRDLKFINGQANVEGWEPSSNNANTGIGGHGSCCSEMDIWEANSISEALTPHPCTTVGQEICEGDGCGGTYSDNRYGGTCDPDGCDWNPYRLGNTSFYGPGSSFTLDTTEKLTVVTQFETSGAINRYYVQNGVTFQQPNAELGSYSGNELNDDYCTAEEAEFGGSSFSDKGGLTQFKKATSGGMVLVMSLWDDYYANMLWLDSTYPTNETSSTPGAVRGSCSTSSGVPAQVESQSPNAKVTFSNIKFGPIGSTGNPSGGNPPGGNPPGTTTTRRPATTTGSSPGPTQSHYGQCGGIGYSGPTVCASGTTCQVLNPYYSQCL

SEQ ID NO: 95 - protein, 497 aa, Trichoderma reesei
QSACTLQSETHPPLTWQKCSSGGTCTQQTGSVVIDANWRWTHATNSSTNCYDGNTWSSTLCPDNETCAKNCCLDGAAYASTYGVTTSGNSLSIGFVTQSAQKNVGARLYLMASDTTYQEFTLLGNEFSFDVDVSQLPCGLNGALYFVSMDADGGVSKYPTNTAGAKYGTGYCDSQCPRDLKFINGQANVEGWEPSSNNANTGIGGHGSCCSEMDIWEANSISEALTPHPCTTVGQEICEGDGCGGTYSDNRYGGTCDPDGCDWNPYRLGNTSFYGPGSSFTLDTTKKLTVVTQFETSGTINRYYVQNGVTFQQPNAELGSYSGNELNDDYCTAEEAEFGGSSFSDKGGLTQFKKATSGGMVLVMSLWDDYYANMLWLDSTYPTNETSSTPGAVRGSCSTSSGVPAQVESQSPNAKVTFSNIKFGPIGSTGNPSGGNPPGGNPPGTTTTRRPATTTGSSPGPTQSHYGQCGGIGYSGPTVCASGTTCQVLNPYYSQCL

SEQ ID NO: 96 - protein, 497 aa, Trichoderma reesei
QSACTLQSETHPPLTWQKCSSGGTCTQQTGSVVIDANWRWTHATNSSTNCYDGNTWSSTLCPDNETCAKNCCLDGAAYASTYGVTTSGNSLSIGFVTQSAQKNVGARLYLMASDTTYQEFTLLGNEFSFDVDVSQLPCGLNGALYFVSMDADGGVSKYPTNTAGAKYGTGYCDSQCPRDLKFINGQANVEGWEPSSNNANTGIGGHGSCCSEMDIWEANSISEALTPHPCTTVGQEICEGDGCGGTYSDNRYGGTCDPDGCDWNPYRLGNTSFYGPGSSFTLDTTKKLTVVTQFETSGAINRYYVQNGVTLQQPNAELGSYSGNELNDDYCTAEEAEFGGSSFSDKGGLTQFKKATSGGMVLVMSLWDDYYANMLWLDSTYPTNETSSTPGAVRGSCSTSSGVPAQVESQSPNAKVTFSNIKFGPIGSTGNPSGGNPPGGNPPGTTTTRRPATTTGSSPGPTQSHYGQCGGIGYSGPTVCASGTTCQVLNPYYSQCL

SEQ ID NO: 97 - protein, 497 aa, Trichoderma reesei
QSACTLQSETHPPLTWQKCSSGGTCTQQTGSVVIDANWRWTHATNSSTNCYDGNTWSSTLCPDNETCAKNCCLDGAAYASTYGVTTSGNSLSIGFVTQSAQKNVGARLYLMASDTTYQEFTLLGNEFSFDVDVSQLPCGLNGALYFVSMDADGGVSKYPTNTAGAKYGTGYCDSQCPRDLKFINGQANVEGWEPSSNNANTGIGGHGSCCSEMDIWEANSISEALTPHPCTTVGQEICEGDGCGGTYSDNRYGGTCDPDGCDWNPYRLGNTSFYGPGSSFTLDTTKKLTVVTQFETSGAINRYYVQNGVTFQQANAELGSYSGNELNDDYCTAEEAEFGGSSFSDKGGLTQFKKATSGGMVLVMSLWDDYYANMLWLDSTYPTNETSSTPGAVRGSCSTSSGVPAQVESQSPNAKVTFSNIKFGPIGSTGNPSGGNPPGGNPPGTTTTRRPATTTGSSPGPTQSHYGQCGGIGYSGPTVCASGTTCQVLNPYYSQCL

SEQ ID NO: 98 - protein, 497 aa, Trichoderma reesei
QSACTLQSETHPPLTWQKCSSGGTCTQQTGSVVIDANWRWTHATNSSTNCYDGNTWSSTLCPDNETCAKNCCLDGAAYASTYGVTTSGNSLSIGFVTQSAQKNVGARLYLMASDTTYQEFTLLGNEFSFDVDVSQLPCGLNGALYFVSMDADGGVSKYPTNTAGAKYGTGYCDSQCPRDLKFINGQANVEGWEPSSNNANTGIGGHGSCCSEMDIWEANSISEALTPHPCTTVGQEICEGDGCGGTYSDNRYGGTCDPDGCDWNPYRLGNTSFYGPGSSFTLDTTKKLTVVTQFETSGAINRYYVQNGVTFQQPNVELGSYSGNELNDDYCTAEEAEFGGSSFSDKGGLTQFKKATSGGMVLVMSLWDDYYANMLWLDSTYPTNETSSTPGAVRGSCSTSSGVPAQVESQSPNAKVTFSNIKFGPIGSTGNPSGGNPPGGNPPGTTTTRRPATTTGSSPGPTQSHYGQCGGIGYSGPTVCASGTTCQVLNPYYSQCL

SEQ ID NO: 99 - protein, 497 aa, Trichoderma reesei
QSACTLQSETHPPLTWQKCSSGGTCTQQTGSVVIDANWRWTHATNSSTNCYDGNTWSSTLCPDNETCAKNCCLDGAAYASTYGVTTSGNSLSIGFVTQSAQKNVGARLYLMASDTTYQEFTLLGNEFSFDVDVSQLPCGLNGALYFVSMDADGGVSKYPTNTAGAKYGTGYCDSQCPRDLKFINGQANVEGWEPSSNNANTGIGGHGSCCSEMDIWEANSISEALTPHPCTTVGQEICEGDGCGGTYSDNRYGGTCDPDGCDWNPYRLGNTSFYGPGSSFTLDTTKKLTVVTQFETSGAINRYYVQNGVTFQQPNAELGSYSGDELNDDYCTAEEAEFGGSSFSDKGGLTQFKKATSGGMVLVMSLWDDYYANMLWLDSTYPTNETSSTPGAVRGSCSTSSGVPAQVESQSPNAKVTFSNIKFGPIGSTGNPSGGNPPGGNPPGTTTTRRPATTTGSSPGPTQSHYGQCGGIGYSGPTVCASGTTCQVLNPYYSQCL

SEQ ID NO: 100 - protein, 497 aa, Trichoderma reesei
QSACTLQSETHPPLTWQKCSSGGTCTQQTGSVVIDANWRWTHATNSSTNCYDGNTWSSTLCPDNETCAKNCCLDGAAYASTYGVTTSGNSLSIGFVTQSAQKNVGARLYLMASDTTYQEFTLLGNEFSFDVDVSQLPCGLNGALYFVSMDADGGVSKYPTNTAGAKYGTGYCDSQCPRDLKFINGQANVEGWEPSSNNANTGIGGHGSCCSEMDIWEANSISEALTPHPCTTVGQEICEGDGCGGTYSDNRYGGTCDPDGCDWNPYRLGNTSFYGPGSSFTLDTTKKLTVVTQFETSGAINRYYVQNGVTFQQPNAELGSYSGNKLNDDYCTAEEAEFGGSSFSDKGGLTQFKKATSGGMVLVMSLWDDYYANMLWLDSTYPTNETSSTPGAVRGSCSTSSGVPAQVESQSPNAKVTFSNIKFGPIGSTGNPSGGNPPGGNPPGTTTTRRPATTTGSSPGPTQSHYGQCGGIGYSGPTVCASGTTCQVLNPYYSQCL

SEQ ID NO: 101 - protein, 497 aa, Trichoderma reesei
QSACTLQSETHPPLTWQKCSSGGTCTQQTGSVVIDANWRWTHATNSSTNCYDGNTWSSTLCPDNETCAKNCCLDGAAYASTYGVTTSGNSLSIGFVTQSAQKNVGARLYLMASDTTYQEFTLLGNEFSFDVDVSQLPCGLNGALYFVSMDADGGVSKYPTNTAGAKYGTGYCDSQCPRDLKFINGQANVEGWEPSSNNANTGIGGHGSCCSEMDIWEANSISEALTPHPCTTVGQEICEGDGCGGTYSDNRYGGTCDPDGCDWNPYRLGNTSFYGPGSSFTLDTTKKLTVVTQFETSGAINRYYVQNGVTFQQPNAELGSYSGNEFNDDYCTAEEAEFGGSSFSDKGGLTQFKKATSGGMVLVMSLWDDYYANMLWLDSTYPTNETSSTPGAVRGSCSTSSGVPAQVESQSPNAKVTFSNIKFGPIGSTGNPSGGNPPGGNPPGTTTTRRPATTTGSSPGPTQSHYGQCGGIGYSGPTVCASGTTCQVLNPYYSQCL

SEQ ID NO: 102 - protein, 497 aa, Trichoderma reesei
QSACTLQSETHPPLTWQKCSSGGTCTQQTGSVVIDANWRWTHATNSSTNCYDGNTWSSTLCPDNETCAKNCCLDGAAYASTYGVTTSGNSLSIGFVTQSAQKNVGARLYLMASDTTYQEFTLLGNEFSFDVDVSQLPCGLNGALYFVSMDADGGVSKYPTNTAGAKYGTGYCDSQCPRDLKFINGQANVEGWEPSSNNANTGIGGHGSCCSEMDIWEANSISEALTPHPCTTVGQEICEGDGCGGTYSDNRYGGTCDPDGCDWNPYRLGNTSFYGPGSSFTLDTTKKLTVVTQFETSGAINRYYVQNGVTFQQPNAELGSYSGNELYDDYCTAEEAEFGGSSFSDKGGLTQFKKATSGGMVLVMSLWDDYYANMLWLDSTYPTNETSSTPGAVRGSCSTSSGVPAQVESQSPNAKVTFSNIKFGPIGSTGNPSGGNPPGGNPPGTTTTRRPATTTGSSPGPTQSHYGQCGGIGYSGPTVCASGTTCQVLNPYYSQCL

SEQ ID NO: 103 - protein, 497 aa, Trichoderma reesei
QSACTLQSETHPPLTWQKCSSGGTCTQQTGSVVIDANWRWTHATNSSTNCYDGNTWSSTLCPDNETCAKNCCLDGAAYASTYGVTTSGNSLSIGFVTQSAQKNVGARLYLMASDTTYQEFTLLGNEFSFDVDVSQLPCGLNGALYFVSMDADGGVSKYPTNTAGAKYGTGYCDSQCPRDLKFINGQANVEGWEPSSNNANTGIGGHGSCCSEMDIWEANSISEALTPHPCTTVGQEICEGDGCGGTYSDNRYGGTCDPDGCDWNPYRLGNTSFYGPGSSFTLDTTKKLTVVTQFETSGAINRYYVQNGVTFQQPNAELGSYSGNELNDDYCIAEEAEFGGSSFSDKGGLTQFKKATSGGMVLVMSLWDDYYANMLWLDSTYPTNETSSTPGAVRGSCSTSSGVPAQVESQSPNAKVTFSNIKFGPIGSTGNPSGGNPPGGNPPGTTTTRRPATTTGSSPGPTQSHYGQCGGIGYSGPTVCASGTTCQVLNPYYSQCL

SEQ ID NO: 104 - protein, 497 aa, Trichoderma reesei
QSACTLQSETHPPLTWQKCSSGGTCTQQTGSVVIDANWRWTHATNSSTNCYDGNTWSSTLCPDNETCAKNCCLDGAAYASTYGVTTSGNSLSIGFVTQSAQKNVGARLYLMASDTTYQEFTLLGNEFSFDVDVSQLPCGLNGALYFVSMDADGGVSKYPTNTAGAKYGTGYCDSQCPRDLKFINGQANVEGWEPSSNNANTGIGGHGSCCSEMDIWEANSISEALTPHPCTTVGQEICEGDGCGGTYSDNRYGGTCDPDGCDWNPYRLGNTSFYGPGSSFTLDTTKKLTVVTQFETSGAINRYYVQNGVTFQQPNAELGSYSGNELNDDYCTAEEAEFDGSSFSDKGGLTQFKKATSGGMVLVMSLWDDYYANMLWLDSTYPTNETSSTPGAVRGSCSTSSGVPAQVESQSPNAKVTFSNIKFGPIGSTGNPSGGNPPGGNPPGTTTTRRPATTTGSSPGPTQSHYGQCGGIGYSGPTVCASGTTCQVLNPYYSQCL

SEQ ID NO: 105 - protein, 497 aa, Trichoderma reesei
QSACTLQSETHPPLTWQKCSSGGTCTQQTGSVVIDANWRWTHATNSSTNCYDGNTWSSTLCPDNETCAKNCCLDGAAYASTYGVTTSGNSLSIGFVTQSAQKNVGARLYLMASDTTYQEFTLLGNEFSFDVDVSQLPCGLNGALYFVSMDADGGVSKYPTNTAGAKYGTGYCDSQCPRDLKFINGQANVEGWEPSSNNANTGIGGHGSCCSEMDIWEANSISEALTPHPCTTVGQEICEGDGCGGTYSDNRYGGTCDPDGCDWNPYRLGNTSFYGPGSSFTLDTTKKLTVVTQFETSGAINRYYVQNGVTFQQPNAELGSYSGNELNDDYCTAEEAEFGGSSLSDKGGLTQFKKATSGGMVLVMSLWDDYYANMLWLDSTYPTNETSSTPGAVRGSCSTSSGVPAQVESQSPNAKVTFSNIKFGPIGSTGNPSGGNPPGGNPPGTTTTRRPATTTGSSPGPTQSHYGQCGGIGYSGPTVCASGTTCQVLNPYYSQCL

SEQ ID NO: 106 - protein, 497 aa, Trichoderma reesei
QSACTLQSETHPPLTWQKCSSGGTCTQQTGSVVIDANWRWTHATNSSTNCYDGNTWSSTLCPDNETCAKNCCLDGAAYASTYGVTTSGNSLSIGFVTQSAQKNVGARLYLMASDTTYQEFTLLGNEFSFDVDVSQLPCGLNGALYFVSMDADGGVSKYPTNTAGAKYGTGYCDSQCPRDLKFINGQANVEGWEPSSNNANTGIGGHGSCCSEMDIWEANSISEALTPHPCTTVGQEICEGDGCGGTYSDNRYGGTCDPDGCDWNPYRLGNTSFYGPGSSFTLDTTKKLTVVTQFETSGAINRYYVQNGVTFQQPNAELGSYSGNELNDDYCTAEEAEFGGSSFSDKGGLTRFKKATSGGMVLVMSLWDDYYANMLWLDSTYPTNETSSTPGAVRGSCSTSSGVPAQVESQSPNAKVTFSNIKFGPIGSTGNPSGGNPPGGNPPGTTTTRRPATTTGSSPGPTQSHYGQCGGIGYSGPTVCASGTTCQVLNPYYSQCL

SEQ ID NO: 107 - protein, 497 aa, Trichoderma reesei
QSACTLQSETHPPLTWQKCSSGGTCTQQTGSVVIDANWRWTHATNSSTNCYDGNTWSSTLCPDNETCAKNCCLDGAAYASTYGVTTSGNSLSIGFVTQSAQKNVGARLYLMASDTTYQEFTLLGNEFSFDVDVSQLPCGLNGALYFVSMDADGGVSKYPTNTAGAKYGTGYCDSQCPRDLKFINGQANVEGWEPSSNNANTGIGGHGSCCSEMDIWEANSISEALTPHPCTTVGQEICEGDGCGGTYSDNRYGGTCDPDGCDWNPYRLGNTSFYGPGSSFTLDTTKKLTVVTQFETSGAINRYYVQNGVTFQQPNAELGSYSGNELNDDYCTAEEAEFGGSSFSDKGGLTQFMKATSGGMVLVMSLWDDYYANMLWLDSTYPTNETSSTPGAVRGSCSTSSGVPAQVESQSPNAKVTFSNIKFGPIGSTGNPSGGNPPGGNPPGTTTTRRPATTTGSSPGPTQSHYGQCGGIGYSGPTVCASGTTCQVLNPYYSQCL

SEQ ID NO: 108 - protein, 497 aa, Trichoderma reesei
QSACTLQSETHPPLTWQKCSSGGTCTQQTGSVVIDANWRWTHATNSSTNCYDGNTWSSTLCPDNETCAKNCCLDGAAYASTYGVTTSGNSLSIGFVTQSAQKNVGARLYLMASDTTYQEFTLLGNEFSFDVDVSQLPCGLNGALYFVSMDADGGVSKYPTNTAGAKYGTGYCDSQCPRDLKFINGQANVEGWEPSSNNANTGIGGHGSCCSEMDIWEANSISEALTPHPCTTVGQEICEGDGCGGTYSDNRYGGTCDPDGCDWNPYRLGNTSFYGPGSSFTLDTTKKLTVVTQFETSGAINRYYVQNGVTFQQPNAELGSYSGNELNDDYCTAEEAEFGGSSFSDKGGLTQFKKAASGGMVLVMSLWDDYYANMLWLDSTYPTNETSSTPGAVRGSCSTSSGVPAQVESQSPNAKVTFSNIKFGPIGSTGNPSGGNPPGGNPPGTTTTRRPATTTGSSPGPTQSHYGQCGGIGYSGPTVCASGTTCQVLNPYYSQCL

SEQ ID NO: 109 - protein, 497 aa, Trichoderma reesei
QSACTLQSETHPPLTWQKCSSGGTCTQQTGSVVIDANWRWTHATNSSTNCYDGNTWSSTLCPDNETCAKNCCLDGAAYASTYGVTTSGNSLSIGFVTQSAQKNVGARLYLMASDTTYQEFTLLGNEFSFDVDVSQLPCGLNGALYFVSMDADGGVSKYPTNTAGAKYGTGYCDSQCPRDLKFINGQANVEGWEPSSNNANTGIGGHGSCCSEMDIWEANSISEALTPHPCTTVGQEICEGDGCGGTYSDNRYGGTCDPDGCDWNPYRLGNTSFYGPGSSFTLDTTKKLTVVTQFETSGAINRYYVQNGVTFQQPNAELGSYSGNELNDDYCTAEEAEFGGSSFSDKGGLTQFKKAISGGMVLVMSLWDDYYANMLWLDSTYPTNETSSTPGAVRGSCSTSSGVPAQVESQSPNAKVTFSNIKFGPIGSTGNPSGGNPPGGNPPGTTTTRRPATTTGSSPGPTQSHYGQCGGIGYSGPTVCASGTTCQVLNPYYSQCL

SEQ ID NO: 110 - protein, 497 aa, Trichoderma reesei
QSACTLQSETHPPLTWQKCSSGGTCTQQTGSVVIDANWRWTHATNSSTNCYDGNTWSSTLCPDNETCAKNCCLDGAAYASTYGVTTSGNSLSIGFVTQSAQKNVGARLYLMASDTTYQEFTLLGNEFSFDVDVSQLPCGLNGALYFVSMDADGGVSKYPTNTAGAKYGTGYCDSQCPRDLKFINGQANVEGWEPSSNNANTGIGGHGSCCSEMDIWEANSISEALTPHPCTTVGQEICEGDGCGGTYSDNRYGGTCDPDGCDWNPYRLGNTSFYGPGSSFTLDTTKKLTVVTQFETSGAINRYYVQNGVTFQQPNAELGSYSGNELNDDYCTAEEAEFGGSSFSDKGGLTQFKKATSSGMVLVMSLWDDYYANMLWLDSTYPTNETSSTPGAVRGSCSTSSGVPAQVESQSPNAKVTFSNIKFGPIGSTGNPSGGNPPGGNPPGTTTTRRPATTTGSSPGPTQSHYGQCGGIGYSGPTVCASGTTCQVLNPYYSQCL

SEQ ID NO: 111 - protein, 497 aa, Trichoderma reesei
QSACTLQSETHPPLTWQKCSSGGTCTQQTGSVVIDANWRWTHATNSSTNCYDGNTWSSTLCPDNETCAKNCCLDGAAYASTYGVTTSGNSLSIGFVTQSAQKNVGARLYLMASDTTYQEFTLLGNEFSFDVDVSQLPCGLNGALYFVSMDADGGVSKYPTNTAGAKYGTGYCDSQCPRDLKFINGQANVEGWEPSSNNANTGIGGHGSCCSEMDIWEANSISEALTPHPCTTVGQEICEGDGCGGTYSDNRYGGTCDPDGCDWNPYRLGNTSFYGPGSSFTLDTTKKLTVVTQFETSGAINRYYVQNGVTFQQPNAELGSYSGNELNDDYCTAEEAEFGGSSFSDKGGLTQFKKATSGGMVLVVSLWDDYYANMLWLDSTYPTNETSSTPGAVRGSCSTSSGVPAQVESQSPNAKVTFSNIKFGPIGSTGNPSGGNPPGGNPPGTTTTRRPATTTGSSPGPTQSHYGQCGGIGYSGPTVCASGTTCQVLNPYYSQCL

SEQ ID NO: 112 - protein, 497 aa, Trichoderma reesei
QSACTLQSETHPPLTWQKCSSGGTCTQQTGSVVIDANWRWTHATNSSTNCYDGNTWSSTLCPDNETCAKNCCLDGAAYASTYGVTTSGNSLSIGFVTQSAQKNVGARLYLMASDTTYQEFTLLGNEFSFDVDVSQLPCGLNGALYFVSMDADGGVSKYPTNTAGAKYGTGYCDSQCPRDLKFINGQANVEGWEPSSNNANTGIGGHGSCCSEMDIWEANSISEALTPHPCTTVGQEICEGDGCGGTYSDNRYGGTCDPDGCDWNPYRLGNTSFYGPGSSFTLDTTKKLTVVTQFETSGAINRYYVQNGVTFQQPNAELGSYSGNELNDDYCTAEEAEFGGSSFSDKGGLTQFKKATSGGMVLVMSLWADYYANMLWLDSTYPTNETSSTPGAVRGSCSTSSGVPAQVESQSPNAKVTFSNIKFGPIGSTGNPSGGNPPGGNPPGTTTTRRPATTTGSSPGPTQSHYGQCGGIGYSGPTVCASGTTCQVLNPYYSQCL

SEQ ID NO: 113 - protein, 497 aa, Trichoderma reesei
QSACTLQSETHPPLTWQKCSSGGTCTQQTGSVVIDANWRWTHATNSSTNCYDGNTWSSTLCPDNETCAKNCCLDGAAYASTYGVTTSGNSLSIGFVTQSAQKNVGARLYLMASDTTYQEFTLLGNEFSFDVDVSQLPCGLNGALYFVSMDADGGVSKYPTNTAGAKYGTGYCDSQCPRDLKFINGQANVEGWEPSSNNANTGIGGHGSCCSEMDIWEANSISEALTPHPCTTVGQEICEGDGCGGTYSDNRYGGTCDPDGCDWNPYRLGNTSFYGPGSSFTLDTTKKLTVVTQFETSGAINRYYVQNGVTFQQPNAELGSYSGNELNDDYCTAEEAEFGGSSFSDKGGLTQFKKATSGGMVLVMSLWGDYYANMLWLDSTYPTNETSSTPGAVRGSCSTSSGVPAQVESQSPNAKVTFSNIKFGPIGSTGNPSGGNPPGGNPPGTTTTRRPATTTGSSPGPTQSHYGQCGGIGYSGPTVCASGTTCQVLNPYYSQCL

SEQ ID NO: 114 - protein, 497 aa, Trichoderma reesei
QSACTLQSETHPPLTWQKCSSGGTCTQQTGSVVIDANWRWTHATNSSTNCYDGNTWSSTLCPDNETCAKNCCLDGAAYASTYGVTTSGNSLSIGFVTQSAQKNVGARLYLMASDTTYQEFTLLGNEFSFDVDVSQLPCGLNGALYFVSMDADGGVSKYPTNTAGAKYGTGYCDSQCPRDLKFINGQANVEGWEPSSNNANTGIGGHGSCCSEMDIWEANSISEALTPHPCTTVGQEICEGDGCGGTYSDNRYGGTCDPDGCDWNPYRLGNTSFYGPGSSFTLDTTKKLTVVTQFETSGAINRYYVQNGVTFQQPNAELGSYSGNELNDDYCTAEEAEFGGSSFSDKGGLTQFKKATSGGMVLVMSLWDDHYANMLWLDSTYPTNETSSTPGAVRGSCSTSSGVPAQVESQSPNAKVTFSNIKFGPIGSTGNPSGGNPPGGNPPGTTTTRRPATTTGSSPGPTQSHYGQCGGIGYSGPTVCASGTTCQVLNPYYSQCL

SEQ ID NO: 115 - protein, 497 aa, Trichoderma reesei
QSACTLQSETHPPLTWQKCSSGGTCTQQTGSVVIDANWRWTHATNSSTNCYDGNTWSSTLCPDNETCAKNCCLDGAAYASTYGVTTSGNSLSIGFVTQSAQKNVGARLYLMASDTTYQEFTLLGNEFSFDVDVSQLPCGLNGALYFVSMDADGGVSKYPTNTAGAKYGTGYCDSQCPRDLKFINGQANVEGWEPSSNNANTGIGGHGSCCSEMDIWEANSISEALTPHPCTTVGQEICEGDGCGGTYSDNRYGGTCDPDGCDWNPYRLGNTSFYGPGSSFTLDTTKKLTVVTQFETSGAINRYYVQNGVTFQQPNAELGSYSGNELNDDYCTAEEAEFGGSSFSDKGGLTQFKKATSGGMVLVMSLWDDYYTNMLWLDSTYPTNETSSTPGAVRGSCSTSSGVPAQVESQSPNAKVTFSNIKFGPIGSTGNPSGGNPPGGNPPGTTTTRRPATTTGSSPGPTQSHYGQCGGIGYSGPTVCASGTTCQVLNPYYSQCL

SEQ ID NO: 116 - protein, 497 aa, Trichoderma reesei
QSACTLQSETHPPLTWQKCSSGGTCTQQTGSVVIDANWRWTHATNSSTNCYDGNTWSSTLCPDNETCAKNCCLDGAAYASTYGVTTSGNSLSIGFVTQSAQKNVGARLYLMASDTTYQEFTLLGNEFSFDVDVSQLPCGLNGALYFVSMDADGGVSKYPTNTAGAKYGTGYCDSQCPRDLKFINGQANVEGWEPSSNNANTGIGGHGSCCSEMDIWEANSISEALTPHPCTTVGQEICEGDGCGGTYSDNRYGGTCDPDGCDWNPYRLGNTSFYGPGSSFTLDTTKKLTVVTQFETSGAINRYYVQNGVTFQQPNAELGSYSGNELNDDYCTAEEAEFGGSSFSDKGGLTQFKKATSGGMVLVMSLWDDYYAYMLWLDSTYPTNETSSTPGAVRGSCSTSSGVPAQVESQSPNAKVTFSNIKFGPIGSTGNPSGGNPPGGNPPGTTTTRRPATTTGSSPGPTQSHYGQCGGIGYSGPTVCASGTTCQVLNPYYSQCL

SEQ ID NO: 117 - protein, 497 aa, Trichoderma reesei
QSACTLQSETHPPLTWQKCSSGGTCTQQTGSVVIDANWRWTHATNSSTNCYDGNTWSSTLCPDNETCAKNCCLDGAAYASTYGVTTSGNSLSIGFVTQSAQKNVGARLYLMASDTTYQEFTLLGNEFSFDVDVSQLPCGLNGALYFVSMDADGGVSKYPTNTAGAKYGTGYCDSQCPRDLKFINGQANVEGWEPSSNNANTGIGGHGSCCSEMDIWEANSISEALTPHPCTTVGQEICEGDGCGGTYSDNRYGGTCDPDGCDWNPYRLGNTSFYGPGSSFTLDTTKKLTVVTQFETSGAINRYYVQNGVTFQQPNAELGSYSGNELNDDYCTAEEAEFGGSSFSDKGGLTQFKKATSGGMVLVMSLWDDYYANVLWLDSTYPTNETSSTPGAVRGSCSTSSGVPAQVESQSPNAKVTFSNIKFGPIGSTGNPSGGNPPGGNPPGTTTTRRPATTTGSSPGPTQSHYGQCGGIGYSGPTVCASGTTCQVLNPYYSQCL

SEQ ID NO: 118 - protein, 497 aa, Trichoderma reesei
QSACTLQSETHPPLTWQKCSSGGTCTQQTGSVVIDANWRWTHATNSSTNCYDGNTWSSTLCPDNETCAKNCCLDGAAYASTYGVTTSGNSLSIGFVTQSAQKNVGARLYLMASDTTYQEFTLLGNEFSFDVDVSQLPCGLNGALYFVSMDADGGVSKYPTNTAGAKYGTGYCDSQCPRDLKFINGQANVEGWEPSSNNANTGIGGHGSCCSEMDIWEANSISEALTPHPCTTVGQEICEGDGCGGTYSDNRYGGTCDPDGCDWNPYRLGNTSFYGPGSSFTLDTTKKLTVVTQFETSGAINRYYVQNGVTFQQPNAELGSYSGNELNDDYCTAEEAEFGGSSFSDKGGLTQFKKATSGGMVLVMSLWDDYYANMAWLDSTYPTNETSSTPGAVRGSCSTSSGVPAQVESQSPNAKVTFSNIKFGPIGSTGNPSGGNPPGGNPPGTTTTRRPATTTGSSPGPTQSHYGQCGGIGYSGPTVCASGTTCQVLNPYYSQCL

SEQ ID NO: 119 - protein, 497 aa, Trichoderma reesei
QSACTLQSETHPPLTWQKCSSGGTCTQQTGSVVIDANWRWTHATNSSTNCYDGNTWSSTLCPDNETCAKNCCLDGAAYASTYGVTTSGNSLSIGFVTQSAQKNVGARLYLMASDTTYQEFTLLGNEFSFDVDVSQLPCGLNGALYFVSMDADGGVSKYPTNTAGAKYGTGYCDSQCPRDLKFINGQANVEGWEPSSNNANTGIGGHGSCCSEMDIWEANSISEALTPHPCTTVGQEICEGDGCGGTYSDNRYGGTCDPDGCDWNPYRLGNTSFYGPGSSFTLDTTKKLTVVTQFETSGAINRYYVQNGVTFQQPNAELGSYSGNELNDDYCTAEEAEFGGSSFSDKGGLTQFKKATSGGMVLVMSLWDDYYANMLWLESTYPTNETSSTPGAVRGSCSTSSGVPAQVESQSPNAKVTFSNIKFGPIGSTGNPSGGNPPGGNPPGTTTTRRPATTTGSSPGPTQSHYGQCGGIGYSGPTVCASGTTCQVLNPYYSQCL

SEQ ID NO: 120 - protein, 497 aa, Trichoderma reesei
QSACTLQSETHPPLTWQKCSSGGTCTQQTGSVVIDANWRWTHATNSSTNCYDGNTWSSTLCPDNETCAKNCCLDGAAYASTYGVTTSGNSLSIGFVTQSAQKNVGARLYLMASDTTYQEFTLLGNEFSFDVDVSQLPCGLNGALYFVSMDADGGVSKYPTNTAGAKYGTGYCDSQCPRDLKFINGQANVEGWEPSSNNANTGIGGHGSCCSEMDIWEANSISEALTPHPCTTVGQEICEGDGCGGTYSDNRYGGTCDPDGCDWNPYRLGNTSFYGPGSSFTLDTTKKLTVVTQFETSGAINRYYVQNGVTFQQPNAELGSYSGNELNDDYCTAEEAEFGGSSFSDKGGLTQFKKATSGGMVLVMSLWDDYYANMLWLDCTYPTNETSSTPGAVRGSCSTSSGVPAQVESQSPNAKVTFSNIKFGPIGSTGNPSGGNPPGGNPPGTTTTRRPATTTGSSPGPTQSHYGQCGGIGYSGPTVCASGTTCQVLNPYYSQCL

SEQ ID NO: 121 - protein, 497 aa, Trichoderma reesei
QSACTLQSETHPPLTWQKCSSGGTCTQQTGSVVIDANWRWTHATNSSTNCYDGNTWSSTLCPDNETCAKNCCLDGAAYASTYGVTTSGNSLSIGFVTQSAQKNVGARLYLMASDTTYQEFTLLGNEFSFDVDVSQLPCGLNGALYFVSMDADGGVSKYPTNTAGAKYGTGYCDSQCPRDLKFINGQANVEGWEPSSNNANTGIGGHGSCCSEMDIWEANSISEALTPHPCTTVGQEICEGDGCGGTYSDNRYGGTCDPDGCDWNPYRLGNTSFYGPGSSFTLDTTKKLTVVTQFETSGAINRYYVQNGVTFQQPNAELGSYSGNELNDDYCTAEEAEFGGSSFSDKGGLTQFKKATSGGMVLVMSLWDDYYANMLWLDETYPTNETSSTPGAVRGSCSTSSGVPAQVESQSPNAKVTFSNIKFGPIGSTGNPSGGNPPGGNPPGTTTTRRPATTTGSSPGPTQSHYGQCGGIGYSGPTVCASGTTCQVLNPYYSQCL

SEQ ID NO: 122 - protein, 497 aa, Trichoderma reesei
QSACTLQSETHPPLTWQKCSSGGTCTQQTGSVVIDANWRWTHATNSSTNCYDGNTWSSTLCPDNETCAKNCCLDGAAYASTYGVTTSGNSLSIGFVTQSAQKNVGARLYLMASDTTYQEFTLLGNEFSFDVDVSQLPCGLNGALYFVSMDADGGVSKYPTNTAGAKYGTGYCDSQCPRDLKFINGQANVEGWEPSSNNANTGIGGHGSCCSEMDIWEANSISEALTPHPCTTVGQEICEGDGCGGTYSDNRYGGTCDPDGCDWNPYRLGNTSFYGPGSSFTLDTTKKLTVVTQFETSGAINRYYVQNGVTFQQPNAELGSYSGNELNDDYCTAEEAEFGGSSFSDKGGLTQFKKATSGGMVLVMSLWDDYYANMLWLDSTYITNETSSTPGAVRGSCSTSSGVPAQVESQSPNAKVTFSNIKFGPIGSTGNPSGGNPPGGNPPGTTTTRRPATTTGSSPGPTQSHYGQCGGIGYSGPTVCASGTTCQVLNPYYSQCL

SEQ ID NO: 123 - protein, 497 aa, Trichoderma reesei
QSACTLQSETHPPLTWQKCSSGGTCTQQTGSVVIDANWRWTHATNSSTNCYDGNTWSSTLCPDNETCAKNCCLDGAAYASTYGVTTSGNSLSIGFVTQSAQKNVGARLYLMASDTTYQEFTLLGNEFSFDVDVSQLPCGLNGALYFVSMDADGGVSKYPTNTAGAKYGTGYCDSQCPRDLKFINGQANVEGWEPSSNNANTGIGGHGSCCSEMDIWEANSISEALTPHPCTTVGQEICEGDGCGGTYSDNRYGGTCDPDGCDWNPYRLGNTSFYGPGSSFTLDTTKKLTVVTQFETSGAINRYYVQNGVTFQQPNAELGSYSGNELNDDYCTAEEAEFGGSSFSDKGGLTQFKKATSGGMVLVMSLWDDYYANMLWLDSTYLTNETSSTPGAVRGSCSTSSGVPAQVESQSPNAKVTFSNIKFGPIGSTGNPSGGNPPGGNPPGTTTTRRPATTTGSSPGPTQSHYGQCGGIGYSGPTVCASGTTCQVLNPYYSQCL

SEQ ID NO: 124 - protein, 497 aa, Trichoderma reesei
QSACTLQSETHPPLTWQKCSSGGTCTQQTGSVVIDANWRWTHATNSSTNCYDGNTWSSTLCPDNETCAKNCCLDGAAYASTYGVTTSGNSLSIGFVTQSAQKNVGARLYLMASDTTYQEFTLLGNEFSFDVDVSQLPCGLNGALYFVSMDADGGVSKYPTNTAGAKYGTGYCDSQCPRDLKFINGQANVEGWEPSSNNANTGIGGHGSCCSEMDIWEANSISEALTPHPCTTVGQEICEGDGCGGTYSDNRYGGTCDPDGCDWNPYRLGNTSFYGPGSSFTLDTTKKLTVVTQFETSGAINRYYVQNGVTFQQPNAELGSYSGNELNDDYCTAEEAEFGGSSFSDKGGLTQFKKATSGGMVLVMSLWDDYYANMLWLDSTYQTNETSSTPGAVRGSCSTSSGVPAQVESQSPNAKVTFSNIKFGPIGSTGNPSGGNPPGGNPPGTTTTRRPATTTGSSPGPTQSHYGQCGGIGYSGPTVCASGTTCQVLNPYYSQCL

SEQ ID NO: 125 - protein, 497 aa, Trichoderma reesei
QSACTLQSETHPPLTWQKCSSGGTCTQQTGSVVIDANWRWTHATNSSTNCYDGNTWSSTLCPDNETCAKNCCLDGAAYASTYGVTTSGNSLSIGFVTQSAQKNVGARLYLMASDTTYQEFTLLGNEFSFDVDVSQLPCGLNGALYFVSMDADGGVSKYPTNTAGAKYGTGYCDSQCPRDLKFINGQANVEGWEPSSNNANTGIGGHGSCCSEMDIWEANSISEALTPHPCTTVGQEICEGDGCGGTYSDNRYGGTCDPDGCDWNPYRLGNTSFYGPGSSFTLDTTKKLTVVTQFETSGAINRYYVQNGVTFQQPNAELGSYSGNELNDDYCTAEEAEFGGSSFSDKGGLTQFKKATSGGMVLVMSLWDDYYANMLWLDSTYPANETSSTPGAVRGSCSTSSGVPAQVESQSPNAKVTFSNIKFGPIGSTGNPSGGNPPGGNPPGTTTTRRPATTTGSSPGPTQSHYGQCGGIGYSGPTVCASGTTCQVLNPYYSQCL

SEQ ID NO: 126 - protein, 497 aa, Trichoderma reesei
QSACTLQSETHPPLTWQKCSSGGTCTQQTGSVVIDANWRWTHATNSSTNCYDGNTWSSTLCPDNETCAKNCCLDGAAYASTYGVTTSGNSLSIGFVTQSAQKNVGARLYLMASDTTYQEFTLLGNEFSFDVDVSQLPCGLNGALYFVSMDADGGVSKYPTNTAGAKYGTGYCDSQCPRDLKFINGQANVEGWEPSSNNANTGIGGHGSCCSEMDIWEANSISEALTPHPCTTVGQEICEGDGCGGTYSDNRYGGTCDPDGCDWNPYRLGNTSFYGPGSSFTLDTTKKLTVVTQFETSGAINRYYVQNGVTFQQPNAELGSYSGNELNDDYCTAEEAEFGGSSFSDKGGLTQFKKATSGGMVLVMSLWDDYYANMLWLDSTYPSNETSSTPGAVRGSCSTSSGVPAQVESQSPNAKVTFSNIKFGPIGSTGNPSGGNPPGGNPPGTTTTRRPATTTGSSPGPTQSHYGQCGGIGYSGPTVCASGTTCQVLNPYYSQCL

SEQ ID NO: 127 - protein, 497 aa, Trichoderma reesei
QSACTLQSETHPPLTWQKCSSGGTCTQQTGSVVIDANWRWTHATNSSTNCYDGNTWSSTLCPDNETCAKNCCLDGAAYASTYGVTTSGNSLSIGFVTQSAQKNVGARLYLMASDTTYQEFTLLGNEFSFDVDVSQLPCGLNGALYFVSMDADGGVSKYPTNTAGAKYGTGYCDSQCPRDLKFINGQANVEGWEPSSNNANTGIGGHGSCCSEMDIWEANSISEALTPHPCTTVGQEICEGDGCGGTYSDNRYGGTCDPDGCDWNPYRLGNTSFYGPGSSFTLDTTKKLTVVTQFETSGAINRYYVQNGVTFQQPNAELGSYSGNELNDDYCTAEEAEFGGSSFSDKGGLTQFKKATSGGMVLVMSLWDDYYANMLWLDSTYPTNGTSSTPGAVRGSCSTSSGVPAQVESQSPNAKVTFSNIKFGPIGSTGNPSGGNPPGGNPPGTTTTRRPATTTGSSPGPTQSHYGQCGGIGYSGPTVCASGTTCQVLNPYYSQCL

SEQ ID NO: 128 - protein, 497 aa, Trichoderma reesei
QSACTLQSETHPPLTWQKCSSGGTCTQQTGSVVIDANWRWTHATNSSTNCYDGNTWSSTLCPDNETCAKNCCLDGAAYASTYGVTTSGNSLSIGFVTQSAQKNVGARLYLMASDTTYQEFTLLGNEFSFDVDVSQLPCGLNGALYFVSMDADGGVSKYPTNTAGAKYGTGYCDSQCPRDLKFINGQANVEGWEPSSNNANTGIGGHGSCCSEMDIWEANSISEALTPHPCTTVGQEICEGDGCGGTYSDNRYGGTCDPDGCDWNPYRLGNTSFYGPGSSFTLDTTKKLTVVTQFETSGAINRYYVQNGVTFQQPNAELGSYSGNELNDDYCTAEEAEFGGSSFSDKGGLTQFKKATSGGMVLVMSLWDDYYANMLWLDSTYPTNITSSTPGAVRGSCSTSSGVPAQVESQSPNAKVTFSNIKFGPIGSTGNPSGGNPPGGNPPGTTTTRRPATTTGSSPGPTQSHYGQCGGIGYSGPTVCASGTTCQVLNPYYSQCL

SEQ ID NO: 129 - protein, 497 aa, Trichoderma reesei
QSACTLQSETHPPLTWQKCSSGGTCTQQTGSVVIDANWRWTHATNSSTNCYDGNTWSSTLCPDNETCAKNCCLDGAAYASTYGVTTSGNSLSIGFVTQSAQKNVGARLYLMASDTTYQEFTLLGNEFSFDVDVSQLPCGLNGALYFVSMDADGGVSKYPTNTAGAKYGTGYCDSQCPRDLKFINGQANVEGWEPSSNNANTGIGGHGSCCSEMDIWEANSISEALTPHPCTTVGQEICEGDGCGGTYSDNRYGGTCDPDGCDWNPYRLGNTSFYGPGSSFTLDTTKKLTVVTQFETSGAINRYYVQNGVTFQQPNAELGSYSGNELNDDYCTAEEAEFGGSSFSDKGGLTQFKKATSGGMVLVMSLWDDYYANMLWLDSTYPTNLTSSTPGAVRGSCSTSSGVPAQVESQSPNAKVTFSNIKFGPIGSTGNPSGGNPPGGNPPGTTTTRRPATTTGSSPGPTQSHYGQCGGIGYSGPTVCASGTTCQVLNPYYSQCL

SEQ ID NO: 130 - protein, 497 aa, Trichoderma reesei
QSACTLQSETHPPLTWQKCSSGGTCTQQTGSVVIDANWRWTHATNSSTNCYDGNTWSSTLCPDNETCAKNCCLDGAAYASTYGVTTSGNSLSIGFVTQSAQKNVGARLYLMASDTTYQEFTLLGNEFSFDVDVSQLPCGLNGALYFVSMDADGGVSKYPTNTAGAKYGTGYCDSQCPRDLKFINGQANVEGWEPSSNNANTGIGGHGSCCSEMDIWEANSISEALTPHPCTTVGQEICEGDGCGGTYSDNRYGGTCDPDGCDWNPYRLGNTSFYGPGSSFTLDTTKKLTVVTQFETSGAINRYYVQNGVTFQQPNAELGSYSGNELNDDYCTAEEAEFGGSSFSDKGGLTQFKKATSGGMVLVMSLWDDYYANMLWLDSTYPTNETSSTAGAVRGSCSTSSGVPAQVESQSPNAKVTFSNIKFGPIGSTGNPSGGNPPGGNPPGTTTTRRPATTTGSSPGPTQSHYGQCGGIGYSGPTVCASGTTCQVLNPYYSQCL

SEQ ID NO: 131 - protein, 497 aa, Trichoderma reesei
QSACTLQSETHPPLTWQKCSSGGTCTQQTGSVVIDANWRWTHATNSSTNCYDGNTWSSTLCPDNETCAKNCCLDGAAYASTYGVTTSGNSLSIGFVTQSAQKNVGARLYLMASDTTYQEFTLLGNEFSFDVDVSQLPCGLNGALYFVSMDADGGVSKYPTNTAGAKYGTGYCDSQCPRDLKFINGQANVEGWEPSSNNANTGIGGHGSCCSEMDIWEANSISEALTPHPCTTVGQEICEGDGCGGTYSDNRYGGTCDPDGCDWNPYRLGNTSFYGPGSSFTLDTTKKLTVVTQFETSGAINRYYVQNGVTFQQPNAELGSYSGNELNDDYCTAEEAEFGGSSFSDKGGLTQFKKATSGGMVLVMSLWDDYYANMLWLDSTYPTNETSSTCGAVRGSCSTSSGVPAQVESQSPNAKVTFSNIKFGPIGSTGNPSGGNPPGGNPPGTTTTRRPATTTGSSPGPTQSHYGQCGGIGYSGPTVCASGTTCQVLNPYYSQCL

SEQ ID NO: 132 - protein, 497 aa, Trichoderma reesei
QSACTLQSETHPPLTWQKCSSGGTCTQQTGSVVIDANWRWTHATNSSTNCYDGNTWSSTLCPDNETCAKNCCLDGAAYASTYGVTTSGNSLSIGFVTQSAQKNVGARLYLMASDTTYQEFTLLGNEFSFDVDVSQLPCGLNGALYFVSMDADGGVSKYPTNTAGAKYGTGYCDSQCPRDLKFINGQANVEGWEPSSNNANTGIGGHGSCCSEMDIWEANSISEALTPHPCTTVGQEICEGDGCGGTYSDNRYGGTCDPDGCDWNPYRLGNTSFYGPGSSFTLDTTKKLTVVTQFETSGAINRYYVQNGVTFQQPNAELGSYSGNELNDDYCTAEEAEFGGSSFSDKGGLTQFKKATSGGMVLVMSLWDDYYANMLWLDSTYPTNETSSTGGAVRGSCSTSSGVPAQVESQSPNAKVTFSNIKFGPIGSTGNPSGGNPPGGNPPGTTTTRRPATTTGSSPGPTQSHYGQCGGIGYSGPTVCASGTTCQVLNPYYSQCL

SEQ ID NO: 133 - protein, 497 aa, Trichoderma reesei
QSACTLQSETHPPLTWQKCSSGGTCTQQTGSVVIDANWRWTHATNSSTNCYDGNTWSSTLCPDNETCAKNCCLDGAAYASTYGVTTSGNSLSIGFVTQSAQKNVGARLYLMASDTTYQEFTLLGNEFSFDVDVSQLPCGLNGALYFVSMDADGGVSKYPTNTAGAKYGTGYCDSQCPRDLKFINGQANVEGWEPSSNNANTGIGGHGSCCSEMDIWEANSISEALTPHPCTTVGQEICEGDGCGGTYSDNRYGGTCDPDGCDWNPYRLGNTSFYGPGSSFTLDTTKKLTVVTQFETSGAINRYYVQNGVTFQQPNAELGSYSGNELNDDYCTAEEAEFGGSSFSDKGGLTQFKKATSGGMVLVMSLWDDYYANMLWLDSTYPTNETSSTKGAVRGSCSTSSGVPAQVESQSPNAKVTFSNIKFGPIGSTGNPSGGNPPGGNPPGTTTTRRPATTTGSSPGPTQSHYGQCGGIGYSGPTVCASGTTCQVLNPYYSQCL

SEQ ID NO: 134 - protein, 497 aa, Trichoderma reesei
QSACTLQSETHPPLTWQKCSSGGTCTQQTGSVVIDANWRWTHATNSSTNCYDGNTWSSTLCPDNETCAKNCCLDGAAYASTYGVTTSGNSLSIGFVTQSAQKNVGARLYLMASDTTYQEFTLLGNEFSFDVDVSQLPCGLNGALYFVSMDADGGVSKYPTNTAGAKYGTGYCDSQCPRDLKFINGQANVEGWEPSSNNANTGIGGHGSCCSEMDIWEANSISEALTPHPCTTVGQEICEGDGCGGTYSDNRYGGTCDPDGCDWNPYRLGNTSFYGPGSSFTLDTTKKLTVVTQFETSGAINRYYVQNGVTFQQPNAELGSYSGNELNDDYCTAEEAEFGGSSFSDKGGLTQFKKATSGGMVLVMSLWDDYYANMLWLDSTYPTNETSSTLGAVRGSCSTSSGVPAQVESQSPNAKVTFSNIKFGPIGSTGNPSGGNPPGGNPPGTTTTRRPATTTGSSPGPTQSHYGQCGGIGYSGPTVCASGTTCQVLNPYYSQCL

SEQ ID NO: 135 - protein, 497 aa, Trichoderma reesei
QSACTLQSETHPPLTWQKCSSGGTCTQQTGSVVIDANWRWTHATNSSTNCYDGNTWSSTLCPDNETCAKNCCLDGAAYASTYGVTTSGNSLSIGFVTQSAQKNVGARLYLMASDTTYQEFTLLGNEFSFDVDVSQLPCGLNGALYFVSMDADGGVSKYPTNTAGAKYGTGYCDSQCPRDLKFINGQANVEGWEPSSNNANTGIGGHGSCCSEMDIWEANSISEALTPHPCTTVGQEICEGDGCGGTYSDNRYGGTCDPDGCDWNPYRLGNTSFYGPGSSFTLDTTKKLTVVTQFETSGAINRYYVQNGVTFQQPNAELGSYSGNELNDDYCTAEEAEFGGSSFSDKGGLTQFKKATSGGMVLVMSLWDDYYANMLWLDSTYPTNETSSTVGAVRGSCSTSSGVPAQVESQSPNAKVTFSNIKFGPIGSTGNPSGGNPPGGNPPGTTTTRRPATTTGSSPGPTQSHYGQCGGIGYSGPTVCASGTTCQVLNPYYSQCL

SEQ ID NO: 136 - protein, 497 aa, Trichoderma reesei
QSACTLQSETHPPLTWQKCSSGGTCTQQTGSVVIDANWRWTHATNSSTNCYDGNTWSSTLCPDNETCAKNCCLDGAAYASTYGVTTSGNSLSIGFVTQSAQKNVGARLYLMASDTTYQEFTLLGNEFSFDVDVSQLPCGLNGALYFVSMDADGGVSKYPTNTAGAKYGTGYCDSQCPRDLKFINGQANVEGWEPSSNNANTGIGGHGSCCSEMDIWEANSISEALTPHPCTTVGQEICEGDGCGGTYSDNRYGGTCDPDGCDWNPYRLGNTSFYGPGSSFTLDTTKKLTVVTQFETSGAINRYYVQNGVTFQQPNAELGSYSGNELNDDYCTAEEAEFGGSSFSDKGGLTQFKKATSGGMVLVMSLWDDYYANMLWLDSTYPTNETSSTWGAVRGSCSTSSGVPAQVESQSPNAKVTFSNIKFGPIGSTGNPSGGNPPGGNPPGTTTTRRPATTTGSSPGPTQSHYGQCGGIGYSGPTVCASGTTCQVLNPYYSQCL

SEQ ID NO: 137 - protein, 497 aa, Trichoderma reesei
QSACTLQSETHPPLTWQKCSSGGTCTQQTGSVVIDANWRWTHATNSSTNCYDGNTWSSTLCPDNETCAKNCCLDGAAYASTYGVTTSGNSLSIGFVTQSAQKNVGARLYLMASDTTYQEFTLLGNEFSFDVDVSQLPCGLNGALYFVSMDADGGVSKYPTNTAGAKYGTGYCDSQCPRDLKFINGQANVEGWEPSSNNANTGIGGHGSCCSEMDIWEANSISEALTPHPCTTVGQEICEGDGCGGTYSDNRYGGTCDPDGCDWNPYRLGNTSFYGPGSSFTLDTTKKLTVVTQFETSGAINRYYVQNGVTFQQPNAELGSYSGNELNDDYCTAEEAEFGGSSFSDKGGLTQFKKATSGGMVLVMSLWDDYYANMLWLDSTYPTNETSSTPGAARGSCSTSSGVPAQVESQSPNAKVTFSNIKFGPIGSTGNPSGGNPPGGNPPGTTTTRRPATTTGSSPGPTQSHYGQCGGIGYSGPTVCASGTTCQVLNPYYSQCL

SEQ ID NO: 138 - protein, 497 aa, Trichoderma reesei
QSACTLQSETHPPLTWQKCSSGGTCTQQTGSVVIDANWRWTHATNSSTNCYDGNTWSSTLCPDNETCAKNCCLDGAAYASTYGVTTSGNSLSIGFVTQSAQKNVGARLYLMASDTTYQEFTLLGNEFSFDVDVSQLPCGLNGALYFVSMDADGGVSKYPTNTAGAKYGTGYCDSQCPRDLKFINGQANVEGWEPSSNNANTGIGGHGSCCSEMDIWEANSISEALTPHPCTTVGQEICEGDGCGGTYSDNRYGGTCDPDGCDWNPYRLGNTSFYGPGSSFTLDTTKKLTVVTQFETSGAINRYYVQNGVTFQQPNAELGSYSGNELNDDYCTAEEAEFGGSSFSDKGGLTQFKKATSGGMVLVMSLWDDYYANMLWLDSTYPTNETSSTPGAVRGSCPTSSGVPAQVESQSPNAKVTFSNIKFGPIGSTGNPSGGNPPGGNPPGTTTTRRPATTTGSSPGPTQSHYGQCGGIGYSGPTVCASGTTCQVLNPYYSQCL

SEQ ID NO: 139 - protein, 497 aa, Trichoderma reesei
QSACTLQSETHPPLTWQKCSSGGTCTQQTGSVVIDANWRWTHATNSSTNCYDGNTWSSTLCPDNETCAKNCCLDGAAYASTYGVTTSGNSLSIGFVTQSAQKNVGARLYLMASDTTYQEFTLLGNEFSFDVDVSQLPCGLNGALYFVSMDADGGVSKYPTNTAGAKYGTGYCDSQCPRDLKFINGQANVEGWEPSSNNANTGIGGHGSCCSEMDIWEANSISEALTPHPCTTVGQEICEGDGCGGTYSDNRYGGTCDPDGCDWNPYRLGNTSFYGPGSSFTLDTTKKLTVVTQFETSGAINRYYVQNGVTFQQPNAELGSYSGNELNDDYCTAEEAEFGGSSFSDKGGLTQFKKATSGGMVLVMSLWDDYYANMLWLDSTYPTNETSSTPGAVRGSCSTGSGVPAQVESQSPNAKVTFSNIKFGPIGSTGNPSGGNPPGGNPPGTTTTRRPATTTGSSPGPTQSHYGQCGGIGYSGPTVCASGTTCQVLNPYYSQCL

SEQ ID NO: 140 - protein, 497 aa, Trichoderma reesei
QSACTLQSETHPPLTWQKCSSGGTCTQQTGSVVIDANWRWTHATNSSTNCYDGNTWSSTLCPDNETCAKNCCLDGAAYASTYGVTTSGNSLSIGFVTQSAQKNVGARLYLMASDTTYQEFTLLGNEFSFDVDVSQLPCGLNGALYFVSMDADGGVSKYPTNTAGAKYGTGYCDSQCPRDLKFINGQANVEGWEPSSNNANTGIGGHGSCCSEMDIWEANSISEALTPHPCTTVGQEICEGDGCGGTYSDNRYGGTCDPDGCDWNPYRLGNTSFYGPGSSFTLDTTKKLTVVTQFETSGAINRYYVQNGVTFQQPNAELGSYSGNELNDDYCTAEEAEFGGSSFSDKGGLTQFKKATSGGMVLVMSLWDDYYANMLWLDSTYPTNETSSTPGAVRGSCSTSSGVPAPVESQSPNAKVTFSNIKFGPIGSTGNPSGGNPPGGNPPGTTTTRRPATTTGSSPGPTQSHYGQCGGIGYSGPTVCASGTTCQVLNPYYSQCL

SEQ ID NO: 141 - protein, 497 aa, Trichoderma reesei
QSACTLQSETHPPLTWQKCSSGGTCTQQTGSVVIDANWRWTHATNSSTNCYDGNTWSSTLCPDNETCAKNCCLDGAAYASTYGVTTSGNSLSIGFVTQSAQKNVGARLYLMASDTTYQEFTLLGNEFSFDVDVSQLPCGLNGALYFVSMDADGGVSKYPTNTAGAKYGTGYCDSQCPRDLKFINGQANVEGWEPSSNNANTGIGGHGSCCSEMDIWEANSISEALTPHPCTTVGQEICEGDGCGGTYSDNRYGGTCDPDGCDWNPYRLGNTSFYGPGSSFTLDTTKKLTVVTQFETSGAINRYYVQNGVTFQQPNAELGSYSGNELNDDYCTAEEAEFGGSSFSDKGGLTQFKKATSGGMVLVMSLWDDYYANMLWLDSTYPTNETSSTPGAVRGSCSTSSGVPAQIESQSPNAKVTFSNIKFGPIGSTGNPSGGNPPGGNPPGTTTTRRPATTTGSSPGPTQSHYGQCGGIGYSGPTVCASGTTCQVLNPYYSQCL

SEQ ID NO: 142 - protein, 497 aa, Trichoderma reesei
QSACTLQSETHPPLTWQKCSSGGTCTQQTGSVVIDANWRWTHATNSSTNCYDGNTWSSTLCPDNETCAKNCCLDGAAYASTYGVTTSGNSLSIGFVTQSAQKNVGARLYLMASDTTYQEFTLLGNEFSFDVDVSQLPCGLNGALYFVSMDADGGVSKYPTNTAGAKYGTGYCDSQCPRDLKFINGQANVEGWEPSSNNANTGIGGHGSCCSEMDIWEANSISEALTPHPCTTVGQEICEGDGCGGTYSDNRYGGTCDPDGCDWNPYRLGNTSFYGPGSSFTLDTTKKLTVVTQFETSGAINRYYVQNGVTFQQPNAELGSYSGNELNDDYCTAEEAEFGGSSFSDKGGLTQFKKATSGGMVLVMSLWDDYYANMLWLDSTYPTNETSSTPGAVRGSCSTSSGVPAQVESQSPNAKVTFFNIKFGPIGSTGNPSGGNPPGGNPPGTTTTRRPATTTGSSPGPTQSHYGQCGGIGYSGPTVCASGTTCQVLNPYYSQCL

SEQ ID NO: 143 - protein, 497 aa, Trichoderma reesei
QSACTLQSETHPPLTWQKCSSGGTCTQQTGSVVIDANWRWTHATNSSTNCYDGNTWSSTLCPDNETCAKNCCLDGAAYASTYGVTTSGNSLSIGFVTQSAQKNVGARLYLMASDTTYQEFTLLGNEFSFDVDVSQLPCGLNGALYFVSMDADGGVSKYPTNTAGAKYGTGYCDSQCPRDLKFINGQANVEGWEPSSNNANTGIGGHGSCCSEMDIWEANSISEALTPHPCTTVGQEICEGDGCGGTYSDNRYGGTCDPDGCDWNPYRLGNTSFYGPGSSFTLDTTKKLTVVTQFETSGAINRYYVQNGVTFQQPNAELGSYSGNELNDDYCTAEEAEFGGSSFSDKGGLTQFKKATSGGMVLVMSLWDDYYANMLWLDSTYPTNETSSTPGAVRGSCSTSSGVPAQVESQSPNAKVTFSDIKFGPIGSTGNPSGGNPPGGNPPGTTTTRRPATTTGSSPGPTQSHYGQCGGIGYSGPTVCASGTTCQVLNPYYSQCL

SEQ ID NO: 144 - protein, 497 aa, Trichoderma reesei
QSACTLQSETHPPLTWQKCSSGGTCTQQTGSVVIDANWRWTHATNSSTNCYDGNTWSSTLCPDNETCAKNCCLDGAAYASTYGVTTSGNSLSIGFVTQSAQKNVGARLYLMASDTTYQEFTLLGNEFSFDVDVSQLPCGLNGALYFVSMDADGGVSKYPTNTAGAKYGTGYCDSQCPRDLKFINGQANVEGWEPSSNNANTGIGGHGSCCSEMDIWEANSISEALTPHPCTTVGQEICEGDGCGGTYSDNRYGGTCDPDGCDWNPYRLGNTSFYGPGSSFTLDTTKKLTVVTQFETSGAINRYYVQNGVTFQQPNAELGSYSGNELNDDYCTAEEAEFGGSSFSDKGGLTQFKKATSGGMVLVMSLWDDYYANMLWLDSTYPTNETSSTPGAVRGSCSTSSGVPAQVESQSPNAKVTFSNIKYGPIGSTGNPSGGNPPGGNPPGTTTTRRPATTTGSSPGPTQSHYGQCGGIGYSGPTVCASGTTCQVLNPYYSQCL

SEQ ID NO: 145 - protein, 497 aa, Trichoderma reesei
QSACTLQSETHPPLTWQKCSSGGTCTQQTGSVVIDANWRWTHATNSSTNCYDGNTWSSTLCPDNETCAKNCCLDGAAYASTYGVTTSGNSLSIGFVTQSAQKNVGARLYLMASDTTYQEFTLLGNEFSFDVDVSQLPCGLNGALYFVSMDADGGVSKYPTNTAGAKYGTGYCDSQCPRDLKFINGQANVEGWEPSSNNANTGIGGHGSCCSEMDIWEANSISEALTPHPCTTVGQEICEGDGCGGTYSDNRYGGTCDPDGCDWNPYRLGNTSFYGPGSSFTLDTTKKLTVVTQFETSGAINRYYVQNGVTFQQPNAELGSYSGNELNDDYCTAEEAEFGGSSFSDKGGLTQFKKATSGGMVLVMSLWDDYYANMLWLDSTYPTNETSSTPGAVRGSCSTSSGVPAQVESQSPNAKVTFSNIKFGPIGSTDNPSGGNPPGGNPPGTTTTRRPATTTGSSPGPTQSHYGQCGGIGYSGPTVCASGTTCQVLNPYYSQCL

SEQ ID NO: 146 - protein, 497 aa, Trichoderma reesei
QSACTLQSETHPPLTWQKCSSGGTCTQQTGSVVIDANWRWTHATNSSTNCYDGNTWSSTLCPDNETCAKNCCLDGAAYASTYGVTTSGNSLSIGFVTQSAQKNVGARLYLMASDTTYQEFTLLGNEFSFDVDVSQLPCGLNGALYFVSMDADGGVSKYPTNTAGAKYGTGYCDSQCPRDLKFINGQANVEGWEPSSNNANTGIGGHGSCCSEMDIWEANSISEALTPHPCTTVGQEICEGDGCGGTYSDNRYGGTCDPDGCDWNPYRLGNTSFYGPGSSFTLDTTKKLTVVTQFETSGAINRYYVQNGVTFQQPNAELGSYSGNELNDDYCTAEEAEFGGSSFSDKGGLTQFKKATSGGMVLVMSLWDDYYANMLWLDSTYPTNETSSTPGAVRGSCSTSSGVPAQVESQSPNAKVTFSNIKFGPIGSTGRPSGGNPPGGNPPGTTTTRRPATTTGSSPGPTQSHYGQCGGIGYSGPTVCASGTTCQVLNPYYSQCL

SEQ ID NO: 147 - protein, 497 aa, Trichoderma reesei
QSACTLQSETHPPLTWQKCSSGGTCTQQTGSVVIDANWRWTHATNSSTNCYDGNTWSSTLCPDNETCAKNCCLDGAAYASTYGVTTSGNSLSIGFVTQSAQKNVGARLYLMASDTTYQEFTLLGNEFSFDVDVSQLPCGLNGALYFVSMDADGGVSKYPTNTAGAKYGTGYCDSQCPRDLKFINGQANVEGWEPSSNNANTGIGGHGSCCSEMDIWEANSISEALTPHPCTTVGQEICEGDGCGGTYSDNRYGGTCDPDGCDWNPYRLGNTSFYGPGSSFTLDTTKKLTVVTQFETSGAINRYYVQNGVTFQQPNAELGSYSGNELNDDYCTAEEAEFGGSSFSDKGGLTQFKKATSGGMVLVMSLWDDYYANMLWLDSTYPTNETSSTPGAVRGSCSTSSGVPAQVESQSPNAKVTFSNIKFGPIGSTGNPSGSNPPGGNPPGTTTTRRPATTTGSSPGPTQSHYGQCGGIGYSGPTVCASGTTCQVLNPYYSQCL

SEQ ID NO: 148 - protein, 497 aa, Trichoderma reesei
QSACTLQSETHPPLTWQKCSSGGTCTQQTGSVVIDANWRWTHATNSSTNCYDGNTWSSTLCPDNETCAKNCCLDGAAYASTYGVTTSGNSLSIGFVTQSAQKNVGARLYLMASDTTYQEFTLLGNEFSFDVDVSQLPCGLNGALYFVSMDADGGVSKYPTNTAGAKYGTGYCDSQCPRDLKFINGQANVEGWEPSSNNANTGIGGHGSCCSEMDIWEANSISEALTPHPCTTVGQEICEGDGCGGTYSDNRYGGTCDPDGCDWNPYRLGNTSFYGPGSSFTLDTTKKLTVVTQFETSGAINRYYVQNGVTFQQPNAELGSYSGNELNDDYCTAEEAEFGGSSFSDKGGLTQFKKATSGGMVLVMSLWDDYYANMLWLDSTYPTNETSSTPGAVRGSCSTSSGVPAQVESQSPNAKVTFSNIKFGPIGSTGNPSGGDPPGGNPPGTTTTRRPATTTGSSPGPTQSHYGQCGGIGYSGPTVCASGTTCQVLNPYYSQCL

SEQ ID NO: 149 - protein, 497 aa, Trichoderma reesei
QSACTLQSETHPPLTWQKCSSGGTCTQQTGSVVIDANWRWTHATNSSTNCYDGNTWSSTLCPDNETCAKNCCLDGAAYASTYGVTTSGNSLSIGFVTQSAQKNVGARLYLMASDTTYQEFTLLGNEFSFDVDVSQLPCGLNGALYFVSMDADGGVSKYPTNTAGAKYGTGYCDSQCPRDLKFINGQANVEGWEPSSNNANTGIGGHGSCCSEMDIWEANSISEALTPHPCTTVGQEICEGDGCGGTYSDNRYGGTCDPDGCDWNPYRLGNTSFYGPGSSFTLDTTKKLTVVTQFETSGAINRYYVQNGVTFQQPNAELGSYSGNELNDDYCTAEEAEFGGSSFSDKGGLTQFKKATSGGMVLVMSLWDDYYANMLWLDSTYPTNETSSTPGAVRGSCSTSSGVPAQVESQSPNAKVTFSNIKFGPIGSTGNPSGGNTPGGNPPGTTTTRRPATTTGSSPGPTQSHYGQCGGIGYSGPTVCASGTTCQVLNPYYSQCL

SEQ ID NO: 150 - protein, 497 aa, Trichoderma reesei
QSACTLQSETHPPLTWQKCSSGGTCTQQTGSVVIDANWRWTHATNSSTNCYDGNTWSSTLCPDNETCAKNCCLDGAAYASTYGVTTSGNSLSIGFVTQSAQKNVGARLYLMASDTTYQEFTLLGNEFSFDVDVSQLPCGLNGALYFVSMDADGGVSKYPTNTAGAKYGTGYCDSQCPRDLKFINGQANVEGWEPSSNNANTGIGGHGSCCSEMDIWEANSISEALTPHPCTTVGQEICEGDGCGGTYSDNRYGGTCDPDGCDWNPYRLGNTSFYGPGSSFTLDTTKKLTVVTQFETSGAINRYYVQNGVTFQQPNAELGSYSGNELNDDYCTAEEAEFGGSSFSDKGGLTQFKKATSGGMVLVMSLWDDYYANMLWLDSTYPTNETSSTPGAVRGSCSTSSGVPAQVESQSPNAKVTFSNIKFGPIGSTGNPSGGNPPGGDPPGTTTTRRPATTTGSSPGPTQSHYGQCGGIGYSGPTVCASGTTCQVLNPYYSQCL

SEQ ID NO: 151 - protein, 497 aa, Trichoderma reesei
QSACTLQSETHPPLTWQKCSSGGTCTQQTGSVVIDANWRWTHATNSSTNCYDGNTWSSTLCPDNETCAKNCCLDGAAYASTYGVTTSGNSLSIGFVTQSAQKNVGARLYLMASDTTYQEFTLLGNEFSFDVDVSQLPCGLNGALYFVSMDADGGVSKYPTNTAGAKYGTGYCDSQCPRDLKFINGQANVEGWEPSSNNANTGIGGHGSCCSEMDIWEANSISEALTPHPCTTVGQEICEGDGCGGTYSDNRYGGTCDPDGCDWNPYRLGNTSFYGPGSSFTLDTTKKLTVVTQFETSGAINRYYVQNGVTFQQPNAELGSYSGNELNDDYCTAEEAEFGGSSFSDKGGLTQFKKATSGGMVLVMSLWDDYYANMLWLDSTYPTNETSSTPGAVRGSCSTSSGVPAQVESQSPNAKVTFSNIKFGPIGSTGNPSGGNPPGGNPPDTTTTRRPATTTGSSPGPTQSHYGQCGGIGYSGPTVCASGTTCQVLNPYYSQCL

SEQ ID NO: 152 - protein, 497 aa, Trichoderma reesei
QSACTLQSETHPPLTWQKCSSGGTCTQQTGSVVIDANWRWTHATNSSTNCYDGNTWSSTLCPDNETCAKNCCLDGAAYASTYGVTTSGNSLSIGFVTQSAQKNVGARLYLMASDTTYQEFTLLGNEFSFDVDVSQLPCGLNGALYFVSMDADGGVSKYPTNTAGAKYGTGYCDSQCPRDLKFINGQANVEGWEPSSNNANTGIGGHGSCCSEMDIWEANSISEALTPHPCTTVGQEICEGDGCGGTYSDNRYGGTCDPDGCDWNPYRLGNTSFYGPGSSFTLDTTKKLTVVTQFETSGAINRYYVQNGVTFQQPNAELGSYSGNELNDDYCTAEEAEFGGSSFSDKGGLTQFKKATSGGMVLVMSLWDDYYANMLWLDSTYPTNETSSTPGAVRGSCSTSSGVPAQVESQSPNAKVTFSNIKFGPIGSTGNPSGGNPPGGNPPGITTTRRPATTTGSSPGPTQSHYGQCGGIGYSGPTVCASGTTCQVLNPYYSQCL

SEQ ID NO: 153 - protein, 497 aa, Trichoderma reesei
QSACTLQSETHPPLTWQKCSSGGTCTQQTGSVVIDANWRWTHATNSSTNCYDGNTWSSTLCPDNETCAKNCCLDGAAYASTYGVTTSGNSLSIGFVTQSAQKNVGARLYLMASDTTYQEFTLLGNEFSFDVDVSQLPCGLNGALYFVSMDADGGVSKYPTNTAGAKYGTGYCDSQCPRDLKFINGQANVEGWEPSSNNANTGIGGHGSCCSEMDIWEANSISEALTPHPCTTVGQEICEGDGCGGTYSDNRYGGTCDPDGCDWNPYRLGNTSFYGPGSSFTLDTTKKLTVVTQFETSGAINRYYVQNGVTFQQPNAELGSYSGNELNDDYCTAEEAEFGGSSFSDKGGLTQFKKATSGGMVLVMSLWDDYYANMLWLDSTYPTNETSSTPGAVRGSCSTSSGVPAQVESQSPNAKVTFSNIKFGPIGSTGNPSGGNPPGGNPPGTATTRRPATTTGSSPGPTQSHYGQCGGIGYSGPTVCASGTTCQVLNPYYSQCL

SEQ ID NO: 154 - protein, 497 aa, Trichoderma reesei
QSACTLQSETHPPLTWQKCSSGGTCTQQTGSVVIDANWRWTHATNSSTNCYDGNTWSSTLCPDNETCAKNCCLDGAAYASTYGVTTSGNSLSIGFVTQSAQKNVGARLYLMASDTTYQEFTLLGNEFSFDVDVSQLPCGLNGALYFVSMDADGGVSKYPTNTAGAKYGTGYCDSQCPRDLKFINGQANVEGWEPSSNNANTGIGGHGSCCSEMDIWEANSISEALTPHPCTTVGQEICEGDGCGGTYSDNRYGGTCDPDGCDWNPYRLGNTSFYGPGSSFTLDTTKKLTVVTQFETSGAINRYYVQNGVTFQQPNAELGSYSGNELNDDYCTAEEAEFGGSSFSDKGGLTQFKKATSGGMVLVMSLWDDYYANMLWLDSTYPTNETSSTPGAVRGSCSTSSGVPAQVESQSPNAKVTFSNIKFGPIGSTGNPSGGNPPGGNPPGTTSTRRPATTTGSSPGPTQSHYGQCGGIGYSGPTVCASGTTCQVLNPYYSQCL

SEQ ID NO: 155 - protein, 497 aa, Trichoderma reesei
QSACTLQSETHPPLTWQKCSSGGTCTQQTGSVVIDANWRWTHATNSSTNCYDGNTWSSTLCPDNETCAKNCCLDGAAYASTYGVTTSGNSLSIGFVTQSAQKNVGARLYLMASDTTYQEFTLLGNEFSFDVDVSQLPCGLNGALYFVSMDADGGVSKYPTNTAGAKYGTGYCDSQCPRDLKFINGQANVEGWEPSSNNANTGIGGHGSCCSEMDIWEANSISEALTPHPCTTVGQEICEGDGCGGTYSDNRYGGTCDPDGCDWNPYRLGNTSFYGPGSSFTLDTTKKLTVVTQFETSGAINRYYVQNGVTFQQPNAELGSYSGNELNDDYCTAEEAEFGGSSFSDKGGLTQFKKATSGGMVLVMSLWDDYYANMLWLDSTYPTNETSSTPGAVRGSCSTSSGVPAQVESQSPNAKVTFSNIKFGPIGSTGNPSGGNPPGGNPPGTTTTRSPATTTGSSPGPTQSHYGQCGGIGYSGPTVCASGTTCQVLNPYYSQCL

SEQ ID NO: 156 - protein, 497 aa, Trichoderma reesei
QSACTLQSETHPPLTWQKCSSGGTCTQQTGSVVIDANWRWTHATNSSTNCYDGNTWSSTLCPDNETCAKNCCLDGAAYASTYGVTTSGNSLSIGFVTQSAQKNVGARLYLMASDTTYQEFTLLGNEFSFDVDVSQLPCGLNGALYFVSMDADGGVSKYPTNTAGAKYGTGYCDSQCPRDLKFINGQANVEGWEPSSNNANTGIGGHGSCCSEMDIWEANSISEALTPHPCTTVGQEICEGDGCGGTYSDNRYGGTCDPDGCDWNPYRLGNTSFYGPGSSFTLDTTKKLTVVTQFETSGAINRYYVQNGVTFQQPNAELGSYSGNELNDDYCTAEEAEFGGSSFSDKGGLTQFKKATSGGMVLVMSLWDDYYANMLWLDSTYPTNETSSTPGAVRGSCSTSSGVPAQVESQSPNAKVTFSNIKFGPIGSTGNPSGGNPPGGNPPGTTTTRRPAITTGSSPGPTQSHYGQCGGIGYSGPTVCASGTTCQVLNPYYSQCL

SEQ ID NO: 157 - protein, 497 aa, Trichoderma reesei
QSACTLQSETHPPLTWQKCSSGGTCTQQTGSVVIDANWRWTHATNSSTNCYDGNTWSSTLCPDNETCAKNCCLDGAAYASTYGVTTSGNSLSIGFVTQSAQKNVGARLYLMASDTTYQEFTLLGNEFSFDVDVSQLPCGLNGALYFVSMDADGGVSKYPTNTAGAKYGTGYCDSQCPRDLKFINGQANVEGWEPSSNNANTGIGGHGSCCSEMDIWEANSISEALTPHPCTTVGQEICEGDGCGGTYSDNRYGGTCDPDGCDWNPYRLGNTSFYGPGSSFTLDTTKKLTVVTQFETSGAINRYYVQNGVTFQQPNAELGSYSGNELNDDYCTAEEAEFGGSSFSDKGGLTQFKKATSGGMVLVMSLWDDYYANMLWLDSTYPTNETSSTPGAVRGSCSTSSGVPAQVESQSPNAKVTFSNIKFGPIGSTGNPSGGNPPGGNPPGTTTTRRPASTTGSSPGPTQSHYGQCGGIGYSGPTVCASGTTCQVLNPYYSQCL

SEQ ID NO: 158 - protein, 497 aa, Trichoderma reesei
QSACTLQSETHPPLTWQKCSSGGTCTQQTGSVVIDANWRWTHATNSSTNCYDGNTWSSTLCPDNETCAKNCCLDGAAYASTYGVTTSGNSLSIGFVTQSAQKNVGARLYLMASDTTYQEFTLLGNEFSFDVDVSQLPCGLNGALYFVSMDADGGVSKYPTNTAGAKYGTGYCDSQCPRDLKFINGQANVEGWEPSSNNANTGIGGHGSCCSEMDIWEANSISEALTPHPCTTVGQEICEGDGCGGTYSDNRYGGTCDPDGCDWNPYRLGNTSFYGPGSSFTLDTTKKLTVVTQFETSGAINRYYVQNGVTFQQPNAELGSYSGNELNDDYCTAEEAEFGGSSFSDKGGLTQFKKATSGGMVLVMSLWDDYYANMLWLDSTYPTNETSSTPGAVRGSCSTSSGVPAQVESQSPNAKVTFSNIKFGPIGSTGNPSGGNPPGGNPPGTTTTRRPATITGSSPGPTQSHYGQCGGIGYSGPTVCASGTTCQVLNPYYSQCL

SEQ ID NO: 159 - protein, 497 aa, Trichoderma reesei
QSACTLQSETHPPLTWQKCSSGGTCTQQTGSVVIDANWRWTHATNSSTNCYDGNTWSSTLCPDNETCAKNCCLDGAAYASTYGVTTSGNSLSIGFVTQSAQKNVGARLYLMASDTTYQEFTLLGNEFSFDVDVSQLPCGLNGALYFVSMDADGGVSKYPTNTAGAKYGTGYCDSQCPRDLKFINGQANVEGWEPSSNNANTGIGGHGSCCSEMDIWEANSISEALTPHPCTTVGQEICEGDGCGGTYSDNRYGGTCDPDGCDWNPYRLGNTSFYGPGSSFTLDTTKKLTVVTQFETSGAINRYYVQNGVTFQQPNAELGSYSGNELNDDYCTAEEAEFGGSSFSDKGGLTQFKKATSGGMVLVMSLWDDYYANMLWLDSTYPTNETSSTPGAVRGSCSTSSGVPAQVESQSPNAKVTFSNIKFGPIGSTGNPSGGNPPGGNPPGTTTTRRPATTQGSSPGPTQSHYGQCGGIGYSGPTVCASGTTCQVLNPYYSQCL

SEQ ID NO: 160 - protein, 497 aa, Trichoderma reesei
QSACTLQSETHPPLTWQKCSSGGTCTQQTGSVVIDANWRWTHATNSSTNCYDGNTWSSTLCPDNETCAKNCCLDGAAYASTYGVTTSGNSLSIGFVTQSAQKNVGARLYLMASDTTYQEFTLLGNEFSFDVDVSQLPCGLNGALYFVSMDADGGVSKYPTNTAGAKYGTGYCDSQCPRDLKFINGQANVEGWEPSSNNANTGIGGHGSCCSEMDIWEANSISEALTPHPCTTVGQEICEGDGCGGTYSDNRYGGTCDPDGCDWNPYRLGNTSFYGPGSSFTLDTTKKLTVVTQFETSGAINRYYVQNGVTFQQPNAELGSYSGNELNDDYCTAEEAEFGGSSFSDKGGLTQFKKATSGGMVLVMSLWDDYYANMLWLDSTYPTNETSSTPGAVRGSCSTSSGVPAQVESQSPNAKVTFSNIKFGPIGSTGNPSGGNPPGGNPPGTTTTRRPATTTGSSLGPTQSHYGQCGGIGYSGPTVCASGTTCQVLNPYYSQCL

SEQ ID NO: 161 - protein, 497 aa, Trichoderma reesei
QSACTLQSETHPPLTWQKCSSGGTCTQQTGSVVIDANWRWTHATNSSTNCYDGNTWSSTLCPDNETCAKNCCLDGAAYASTYGVTTSGNSLSIGFVTQSAQKNVGARLYLMASDTTYQEFTLLGNEFSFDVDVSQLPCGLNGALYFVSMDADGGVSKYPTNTAGAKYGTGYCDSQCPRDLKFINGQANVEGWEPSSNNANTGIGGHGSCCSEMDIWEANSISEALTPHPCTTVGQEICEGDGCGGTYSDNRYGGTCDPDGCDWNPYRLGNTSFYGPGSSFTLDTTKKLTVVTQFETSGAINRYYVQNGVTFQQPNAELGSYSGNELNDDYCTAEEAEFGGSSFSDKGGLTQFKKATSGGMVLVMSLWDDYYANMLWLDSTYPTNETSSTPGAVRGSCSTSSGVPAQVESQSPNAKVTFSNIKFGPIGSTGNPSGGNPPGGNPPGTTTTRRPATTTGSSPGPTKSHYGQCGGIGYSGPTVCASGTTCQVLNPYYSQCL

SEQ ID NO: 162 - protein, 497 aa, Trichoderma reesei
QSACTLQSETHPPLTWQKCSSGGTCTQQTGSVVIDANWRWTHATNSSTNCYDGNTWSSTLCPDNETCAKNCCLDGAAYASTYGVTTSGNSLSIGFVTQSAQKNVGARLYLMASDTTYQEFTLLGNEFSFDVDVSQLPCGLNGALYFVSMDADGGVSKYPTNTAGAKYGTGYCDSQCPRDLKFINGQANVEGWEPSSNNANTGIGGHGSCCSEMDIWEANSISEALTPHPCTTVGQEICEGDGCGGTYSDNRYGGTCDPDGCDWNPYRLGNTSFYGPGSSFTLDTTKKLTVVTQFETSGAINRYYVQNGVTFQQPNAELGSYSGNELNDDYCTAEEAEFGGSSFSDKGGLTQFKKATSGGMVLVMSLWDDYYANMLWLDSTYPTNETSSTPGAVRGSCSTSSGVPAQVESQSPNAKVTFSNIKFGPIGSTGNPSGGNPPGGNPPGTTTTRRPATTTGSSPGPTLSHYGQCGGIGYSGPTVCASGTTCQVLNPYYSQCL

SEQ ID NO: 163 - protein, 497 aa, Trichoderma reesei
QSACTLQSETHPPLTWQKCSSGGTCTQQTGSVVIDANWRWTHATNSSTNCYDGNTWSSTLCPDNETCAKNCCLDGAAYASTYGVTTSGNSLSIGFVTQSAQKNVGARLYLMASDTTYQEFTLLGNEFSFDVDVSQLPCGLNGALYFVSMDADGGVSKYPTNTAGAKYGTGYCDSQCPRDLKFINGQANVEGWEPSSNNANTGIGGHGSCCSEMDIWEANSISEALTPHPCTTVGQEICEGDGCGGTYSDNRYGGTCDPDGCDWNPYRLGNTSFYGPGSSFTLDTTKKLTVVTQFETSGAINRYYVQNGVTFQQPNAELGSYSGNELNDDYCTAEEAEFGGSSFSDKGGLTQFKKATSGGMVLVMSLWDDYYANMLWLDSTYPTNETSSTPGAVRGSCSTSSGVPAQVESQSPNAKVTFSNIKFGPIGSTGNPSGGNPPGGNPPGTTTTRRPATTTGSSPGPTSSHYGQCGGIGYSGPTVCASGTTCQVLNPYYSQCL

SEQ ID NO: 164 - protein, 497 aa, Trichoderma reesei
QSACTLQSETHPPLTWQKCSSGGTCTQQTGSVVIDANWRWTHATNSSTNCYDGNTWSSTLCPDNETCAKNCCLDGAAYASTYGVTTSGNSLSIGFVTQSAQKNVGARLYLMASDTTYQEFTLLGNEFSFDVDVSQLPCGLNGALYFVSMDADGGVSKYPTNTAGAKYGTGYCDSQCPRDLKFINGQANVEGWEPSSNNANTGIGGHGSCCSEMDIWEANSISEALTPHPCTTVGQEICEGDGCGGTYSDNRYGGTCDPDGCDWNPYRLGNTSFYGPGSSFTLDTTKKLTVVTQFETSGAINRYYVQNGVTFQQPNAELGSYSGNELNDDYCTAEEAEFGGSSFSDKGGLTQFKKATSGGMVLVMSLWDDYYANMLWLDSTYPTNETSSTPGAVRGSCSTSSGVPAQVESQSPNAKVTFSNIKFGPIGSTGNPSGGNPPGGNPPGTTTTRRPATTTGSSPGPTQSHSGQCGGIGYSGPTVCASGTTCQVLNPYYSQCL

SEQ ID NO: 165 - protein, 497 aa, Trichoderma reesei
QSACTLQSETHPPLTWQKCSSGGTCTQQTGSVVIDANWRWTHATNSSTNCYDGNTWSSTLCPDNETCAKNCCLDGAAYASTYGVTTSGNSLSIGFVTQSAQKNVGARLYLMASDTTYQEFTLLGNEFSFDVDVSQLPCGLNGALYFVSMDADGGVSKYPTNTAGAKYGTGYCDSQCPRDLKFINGQANVEGWEPSSNNANTGIGGHGSCCSEMDIWEANSISEALTPHPCTTVGQEICEGDGCGGTYSDNRYGGTCDPDGCDWNPYRLGNTSFYGPGSSFTLDTTKKLTVVTQFETSGAINRYYVQNGVTFQQPNAELGSYSGNELNDDYCTAEEAEFGGSSFSDKGGLTQFKKATSGGMVLVMSLWDDYYANMLWLDSTYPTNETSSTPGAVRGSCSTSSGVPAQVESQSPNAKVTFSNIKFGPIGSTGNPSGGNPPGGNPPGTTTTRRPATTTGSSPGPTQSHYDQCGGIGYSGPTVCASGTTCQVLNPYYSQCL

SEQ ID NO: 166 - protein, 497 aa, Trichoderma reesei
QSACTLQSETHPPLTWQKCSSGGTCTQQTGSVVIDANWRWTHATNSSTNCYDGNTWSSTLCPDNETCAKNCCLDGAAYASTYGVTTSGNSLSIGFVTQSAQKNVGARLYLMASDTTYQEFTLLGNEFSFDVDVSQLPCGLNGALYFVSMDADGGVSKYPTNTAGAKYGTGYCDSQCPRDLKFINGQANVEGWEPSSNNANTGIGGHGSCCSEMDIWEANSISEALTPHPCTTVGQEICEGDGCGGTYSDNRYGGTCDPDGCDWNPYRLGNTSFYGPGSSFTLDTTKKLTVVTQFETSGAINRYYVQNGVTFQQPNAELGSYSGNELNDDYCTAEEAEFGGSSFSDKGGLTQFKKATSGGMVLVMSLWDDYYANMLWLDSTYPTNETSSTPGAVRGSCSTSSGVPAQVESQSPNAKVTFSNIKFGPIGSTGNPSGGNPPGGNPPGTTTTRRPATTTGSSPGPTQSHYGQCGSIGYSGPTVCASGTTCQVLNPYYSQCL

SEQ ID NO: 167 - protein, 497 aa, Trichoderma reesei
QSACTLQSETHPPLTWQKCSSGGTCTQQTGSVVIDANWRWTHATNSSTNCYDGNTWSSTLCPDNETCAKNCCLDGAAYASTYGVTTSGNSLSIGFVTQSAQKNVGARLYLMASDTTYQEFTLLGNEFSFDVDVSQLPCGLNGALYFVSMDADGGVSKYPTNTAGAKYGTGYCDSQCPRDLKFINGQANVEGWEPSSNNANTGIGGHGSCCSEMDIWEANSISEALTPHPCTTVGQEICEGDGCGGTYSDNRYGGTCDPDGCDWNPYRLGNTSFYGPGSSFTLDTTKKLTVVTQFETSGAINRYYVQNGVTFQQPNAELGSYSGNELNDDYCTAEEAEFGGSSFSDKGGLTQFKKATSGGMVLVMSLWDDYYANMLWLDSTYPTNETSSTPGAVRGSCSTSSGVPAQVESQSPNAKVTFSNIKFGPIGSTGNPSGGNPPGGNPPGTTTTRRPATTTGSSPGPTQSHYGQCGGIGYNGPTVCASGTTCQVLNPYYSQCL

SEQ ID NO: 168 - protein, 497 aa, Trichoderma reesei
QSACTLQSETHPPLTWQKCSSGGTCTQQTGSVVIDANWRWTHATNSSTNCYDGNTWSSTLCPDNETCAKNCCLDGAAYASTYGVTTSGNSLSIGFVTQSAQKNVGARLYLMASDTTYQEFTLLGNEFSFDVDVSQLPCGLNGALYFVSMDADGGVSKYPTNTAGAKYGTGYCDSQCPRDLKFINGQANVEGWEPSSNNANTGIGGHGSCCSEMDIWEANSISEALTPHPCTTVGQEICEGDGCGGTYSDNRYGGTCDPDGCDWNPYRLGNTSFYGPGSSFTLDTTKKLTVVTQFETSGAINRYYVQNGVTFQQPNAELGSYSGNELNDDYCTAEEAEFGGSSFSDKGGLTQFKKATSGGMVLVMSLWDDYYANMLWLDSTYPTNETSSTPGAVRGSCSTSSGVPAQVESQSPNAKVTFSNIKFGPIGSTGNPSGGNPPGGNPPGTTTTRRPATTTGSSPGPTQSHYGQCGGIGYSDPTVCASGTTCQVLNPYYSQCL

SEQ ID NO: 169 - protein, 497 aa, Trichoderma reesei
QSACTLQSETHPPLTWQKCSSGGTCTQQTGSVVIDANWRWTHATNSSTNCYDGNTWSSTLCPDNETCAKNCCLDGAAYASTYGVTTSGNSLSIGFVTQSAQKNVGARLYLMASDTTYQEFTLLGNEFSFDVDVSQLPCGLNGALYFVSMDADGGVSKYPTNTAGAKYGTGYCDSQCPRDLKFINGQANVEGWEPSSNNANTGIGGHGSCCSEMDIWEANSISEALTPHPCTTVGQEICEGDGCGGTYSDNRYGGTCDPDGCDWNPYRLGNTSFYGPGSSFTLDTTKKLTVVTQFETSGAINRYYVQNGVTFQQPNAELGSYSGNELNDDYCTAEEAEFGGSSFSDKGGLTQFKKATSGGMVLVMSLWDDYYANMLWLDSTYPTNETSSTPGAVRGSCSTSSGVPAQVESQSPNAKVTFSNIKFGPIGSTGNPSGGNPPGGNPPGTTTTRRPATTTGSSPGPTQSHYGQCGGIGYSGPTVCANGTTCQVLNPYYSQCL

SEQ ID NO: 170 - protein, 497 aa, Trichoderma reesei
QSACTLQSETHPPLTWQKCSSGGTCTQQTGSVVIDANWRWTHATNSSTNCYDGNTWSSTLCPDNETCAKNCCLDGAAYASTYGVTTSGNSLSIGFVTQSAQKNVGARLYLMASDTTYQEFTLLGNEFSFDVDVSQLPCGLNGALYFVSMDADGGVSKYPTNTAGAKYGTGYCDSQCPRDLKFINGQANVEGWEPSSNNANTGIGGHGSCCSEMDIWEANSISEALTPHPCTTVGQEICEGDGCGGTYSDNRYGGTCDPDGCDWNPYRLGNTSFYGPGSSFTLDTTKKLTVVTQFETSGAINRYYVQNGVTFQQPNAELGSYSGNELNDDYCTAEEAEFGGSSFSDKGGLTQFKKATSGGMVLVMSLWDDYYANMLWLDSTYPTNETSSTPGAVRGSCSTSSGVPAQVESQSPNAKVTFSNIKFGPIGSTGNPSGGNPPGGNPPGTTTTRRPATTTGSSPGPTQSHYGQCGGIGYSGPTVCASSTTCQVLNPYYSQCL

SEQ ID NO: 171 - protein, 497 aa, Trichoderma reesei
QSACTLQSETHPPLTWQKCSSGGTCTQQTGSVVIDANWRWTHATNSSTNCYDGNTWSSTLCPDNETCAKNCCLDGAAYASTYGVTTSGNSLSIGFVTQSAQKNVGARLYLMASDTTYQEFTLLGNEFSFDVDVSQLPCGLNGALYFVSMDADGGVSKYPTNTAGAKYGTGYCDSQCPRDLKFINGQANVEGWEPSSNNANTGIGGHGSCCSEMDIWEANSISEALTPHPCTTVGQEICEGDGCGGTYSDNRYGGTCDPDGCDWNPYRLGNTSFYGPGSSFTLDTTKKLTVVTQFETSGAINRYYVQNGVTFQQPNAELGSYSGNELNDDYCTAEEAEFGGSSFSDKGGLTQFKKATSGGMVLVMSLWDDYYANMLWLDSTYPTNETSSTPGAVRGSCSTSSGVPAQVESQSPNAKVTFSNIKFGPIGSTGNPSGGNPPGGNPPGTTTTRRPATTTGSSPGPTQSHYGQCGGIGYSGPTVCASVTTCQVLNPYYSQCL

SEQ ID NO: 172 - protein, 497 aa, Trichoderma reesei
QSACTLQSETHPPLTWQKCSSGGTCTQQTGSVVIDANWRWTHATNSSTNCYDGNTWSSTLCPDNETCAKNCCLDGAAYASTYGVTTSGNSLSIGFVTQSAQKNVGARLYLMASDTTYQEFTLLGNEFSFDVDVSQLPCGLNGALYFVSMDADGGVSKYPTNTAGAKYGTGYCDSQCPRDLKFINGQANVEGWEPSSNNANTGIGGHGSCCSEMDIWEANSISEALTPHPCTTVGQEICEGDGCGGTYSDNRYGGTCDPDGCDWNPYRLGNTSFYGPGSSFTLDTTKKLTVVTQFETSGAINRYYVQNGVTFQQPNAELGSYSGNELNDDYCTAEEAEFGGSSFSDKGGLTQFKKATSGGMVLVMSLWDDYYANMLWLDSTYPTNETSSTPGAVRGSCSTSSGVPAQVESQSPNAKVTFSNIKFGPIGSTGNPSGGNPPGGNPPGTTTTRRPATTTGSSPGPTQSHYGQCGGIGYSGPTVCASGTTRQVLNPYYSQCL

SEQ ID NO: 173 - protein, 497 aa, Trichoderma reesei
QSACTLQSETHPPLTWQKCSSGGTCTQQTGSVVIDANWRWTHATNSSTNCYDGNTWSSTLCPDNETCAKNCCLDGAAYASTYGVTTSGNSLSIGFVTQSAQKNVGARLYLMASDTTYQEFTLLGNEFSFDVDVSQLPCGLNGALYFVSMDADGGVSKYPTNTAGAKYGTGYCDSQCPRDLKFINGQANVEGWEPSSNNANTGIGGHGSCCSEMDIWEANSISEALTPHPCTTVGQEICEGDGCGGTYSDNRYGGTCDPDGCDWNPYRLGNTSFYGPGSSFTLDTTKKLTVVTQFETSGAINRYYVQNGVTFQQPNAELGSYSGNELNDDYCTAEEAEFGGSSFSDKGGLTQFKKATSGGMVLVMSLWDDYYANMLWLDSTYPTNETSSTPGAVRGSCSTSSGVPAQVESQSPNAKVTFSNIKFGPIGSTGNPSGGNPPGGNPPGTTTTRRPATTTGSSPGPTQSHYGQCGGIGYSGPTVCASGTTCQDLNPYYSQCL

SEQ ID NO: 174 - protein, 497 aa, Trichoderma reesei
QSACTLQSETHPPLTWQKCSSGGTCTQQTGSVVIDANWRWTHATNSSTNCYDGNTWSSTLCPDNETCAKNCCLDGAAYASTYGVTTSGNSLSIGFVTQSAQKNVGARLYLMASDTTYQEFTLLGNEFSFDVDVSQLPCGLNGALYFVSMDADGGVSKYPTNTAGAKYGTGYCDSQCPRDLKFINGQANVEGWEPSSNNANTGIGGHGSCCSEMDIWEANSISEALTPHPCTTVGQEICEGDGCGGTYSDNRYGGTCDPDGCDWNPYRLGNTSFYGPGSSFTLDTTKKLTVVTQFETSGAINRYYVQNGVTFQQPNAELGSYSGNELNDDYCTAEEAEFGGSSFSDKGGLTQFKKATSGGMVLVMSLWDDYYANMLWLDSTYPTNETSSTPGAVRGSCSTSSGVPAQVESQSPNAKVTFSNIKFGPIGSTGNPSGGNPPGGNPPGTTTTRRPATTTGSSPGPTQSHYGQCGGIGYSGPTVCASGTTCQVPNPYYSQCL

SEQ ID NO: 175 - protein, 497 aa, Trichoderma reesei
QSACTLQSETHPPLTWQKCSSGGTCTQQTGSVVIDANWRWTHATNSSTNCYDGNTWSSTLCPDNETCAKNCCLDGAAYASTYGVTTSGNSLSIGFVTQSAQKNVGARLYLMASDTTYQEFTLLGNEFSFDVDVSQLPCGLNGALYFVSMDADGGVSKYPTNTAGAKYGTGYCDSQCPRDLKFINGQANVEGWEPSSNNANTGIGGHGSCCSEMDIWEANSISEALTPHPCTTVGQEICEGDGCGGTYSDNRYGGTCDPDGCDWNPYRLGNTSFYGPGSSFTLDTTKKLTVVTQFETSGAINRYYVQNGVTFQQPNAELGSYSGNELNDDYCTAEEAEFGGSSFSDKGGLTQFKKATSGGMVLVMSLWDDYYANMLWLDSTYPTNETSSTPGAVRGSCSTSSGVPAQVESQSPNAKVTFSNIKFGPIGSTGNPSGGNPPGGNPPGTTTTRRPATTTGSSPGPTQSHYGQCGGIGYSGPTVCASGTTCQVQNPYYSQCL

SEQ ID NO: 176 - protein, 497 aa, Trichoderma reesei
QSACTLQSETHPTLTWQKCSSGGTCTQQTGSVVIDANWRWTHATNSSTNCYDGNTWSSTLCPDNETCAKNCCLDGAAYASTYGVTTSGNSLSIGFVTQSAQKNVGARLYLMASDTTYQEFTLLGNEFSFDVDVSQLPCGLNGALYFVSMDADGGVSKYPTNTAGAKYGTGYCDSQCPRDLKFISGQANVEGWEPSSNNANTGIGGHGSCCSEMDIWEANSISEALTPHPCTTVGQEICEGDGCGGTYSDNRYGGTCDPDGCDWNPYRLGNTSFYGPGSSFTLDTTKKLTVVTQFETSGAINRYYVQNGVTFQQPNAELGSYSGNELNDDYCTAEEAEFGGSSFSDKGGLTQFKKATSGGMVLVMSLWDDYYANMLWLDSTYPTNETSSTPGAVRGSCSTSSGVPAQVESQSPNAKVTFSNIKFGPIGSTGNPSGGNPPGGNPPGTTTTRRPATTTGSSPGPTQSHYGQCGGIGYSGPTVCASGTTCQVLNPYYSQCL

SEQ ID NO: 177 - protein, 497 aa, Trichoderma reesei
QSACTLQSETHPPLTWQKCSSGGTCAQQTGSVVIDANWRWTHATNSSTNCYDGNTWSSTLCPDNETCAKNCCLDGAAYASTYGVTTSGNSLSIGFVTQSAQKNVGARLYLMASDTTYQEFTLLGNEFSFDVDVSQLPCGLNGALYFVSMDADGGVSKYPTNTAGAKYGTGYCDSQCPRDLKFINGQANVEGWEPSSNNANTGIGGHGSCCSEMDIWEANSISEALTPHPCTTVGQEICEGDGCGGTYSDNRYGGTCDPDGCDWNTYRLGNTSFYGPGSSFTLDTTKKLTVVTQFETSGAINRYYVQNGVTFQQPNAELGSYSGNELNDDYCTAEEAEFGGSSFSDKGGLTQFKKATSGGMVLVMSLWDDYYANMLWLDSTYPTNETSSTPGAVRGSCSTSSGVPAQVESQSPNAKVTFSNIKFGPIGSTGNPSGGNPPGGNPPGTTTTRRPATTTGSSPGPTQSHYGQCGGIGYSGPTVCASGTTCQVLNPYYSQCL

SEQ ID NO: 178 - protein, 497 aa, Trichoderma reesei
QSACTLQSETHPPLTWQKCSSGGTCSQQTGSVVIDANWRWTHATNSSTNCYDGNTWSSTLCPDNETCAKNCCLDGAAYASTYGVTTSGNSLSIGFVTQSAQKNVGARLYLMASDTTYQEFTLLGNEFSFDVDVSQLPCGLNGALYFVSMDADGGVSKYPTNTAGAKYGTGYCDSQCPRDLKFINGQANVEGWEPSSNNANTGIGGHGSCCSEMDIWEANSISEALTPHPCTTVGQETCEGDGCGGTYSDNRYGGTCDPDGCDWNPYRLGNTSFYGPGSSFTLDTTKKLTVVTQFETSGAINRYYVQNGVTFQQPNAELGSYSGNELNDDYCTAEEAEFGGSSFSDKGGLTQFKKATSGGMVLVMSLWDDYYANMLWLDSTYPTNETSSTPGAVRGSCSTSSGVPAQVESQSPNAKVTFSNIKFGPIGSTGNPSGGNPPGGNPPGTTTTRRPATTTGSSPGPTQSHYGQCGGIGYSGPTVCASGTTCQVLNPYYSQCL

SEQ ID NO: 179 - protein, 497 aa, Trichoderma reesei
QSACTLQSETHPPLTWQKCSSGGTCTQQTGSVVIDANWRWTHATDSSTNCYRGNTWSSTLCPDNETCAKNCCLDGAAYASTYGVTTSGNSLSIGFVTQSAQKNVGARLYLMASDTTYQEFTLLGNEFSFDVDVSQLPCGLNGALYFVSMDADGGVSKYPTNTAGAKYGTGYCDSQCPRDLKFINGQANVEGWEPSSNNANTGIGGHGSCCSEMDIWEANSISEALTPHPCTTVGQEICEGDGCGGTYSDNRYGGTCDPDGCDWNPYRLGNTSFYGPGSSFTLDTTKKLTVVTQFETSGAINRYYVQNGVTFQQPNAELGSYSGNELNDDYCTAEEAEFGGSSFSDKGGLTQFKKATSGGMVLVMSLWDDYYANMLWLDSTYPTNETSSTPGAVRGSCSTSSGVPAQVESQSPNAKVTFSNIKFGPIGSTGNPSGGNPPGGNPPGTTTTRRPATTTGSSPGPTQSHYGQCGGIGYSGPTVCASGTTCQVLNPYYSQCL

SEQ ID NO: 180 - protein, 497 aa, Trichoderma reesei
QSACTLQSETHPPLTWQKCSSGGTCTQQTGSVVIDANWRWTHATDSSTNCYDGNTWSSTLCPDNETCAKNCCLDGAAYASTYGVTTSGNSLSIGFVTQSAQKNVGARLYLMASDTTYQEFTLLGNEFSFDVDVSQLPCGLNGALYFVSMDADGGVSKYPTNTAGAKYGTGYCDSQCPRDLKFINGQANVEGWEPSSNNANTGIGGHGSCCSEMDIWEANSISEALTPHPCTTVGQEICEGDGCGGTYSDNRYGGTCDPDGCDWNPYRLGNTSFYGPGSSFTLDTTKKLTVVTQFETSGAINRYYVQNGVTFQQPNAELGSYSGNELNDDYCTAEEAEFDGSSFSDKGGLTQFKKATSGGMVLVMSLWDDYYANMLWLDSTYPTNETSSTPGAVRGSCSTSSGVPAQVESQSPNAKVTFSNIKFGPIGSTGNPSGGNPPGGNPPGTTTTRRPATTTGSSPGPTQSHYGQCGGIGYSGPTVCASGTTCQVLNPYYSQCL

SEQ ID NO: 181 - protein, 497 aa, Trichoderma reesei
QSACTLQSETHPPLTWQKCSSGGTCTQQTGSVVIDANWRWTHATNSSTNCYDGITWSSTLCPDNETCAKNCCLDGAAYASTYGVTTSGNSLSIGFVTQSAQKNVGARLYLMASDTTYQEFTLLGNEFSFDVDVSQLPCGLNGALYFVSMDADGGVSKYPTNTAGAKYGTGYCDSQCPRDLKFINGQANVEGWEPSSNNANTGIGGHGSCCSEMDIWEANSISEALTPHPCTTVGQEICEGDGCGGTYSDNRYGGTCDPDGCDWNPYRLGNTSFYGPGSSFTLDTTKKLTVVTQFETSGAINRYYVQNGVTFQQPNAELGSYSGNELNDDYCTAEEAEFGGSSFSDKGGLTQFKKATSGGMVLVMSLWDDYYANMLWLDSTYPTNETSSTPGAVRGSCSTSSGVPAQVESQSPNAKVTFSNIKFGPIGSTGNPSGGNPPGGNPPGTTTTRRPATTTGSSPGPTQSHYGQCGSIGYSGPTVCASGTTCQVLNPYYSQCL

SEQ ID NO: 182 - protein, 497 aa, Trichoderma reesei
QSACTLQSETHPPLTWQKCSSGGTCTQQTGSVVIDANWRWTHATNSSTNCYDGSTWSSTLCPDNETCAKNCCLDGAAYASTYGVTTSGNSLSIGFVTQSAQKNVGARLYLMASDTTYQEFTLLGNEFSFEVDVSQLPCGLNGALYFVSMDADGGVSKYPTNTAGAKYGTGYCDSQCPRDLKFINGQANVEGWEPSSNNANTGIGGHGSCCSEMDIWEANSISEALTPHPCTTVGQEICEGDGCGGTYSDNRYGGTCDPDGCDWNPYRLGNTSFYGPGSSFTLDTTKKLTVVTQFETSGAINRYYVQNGVTFQQPNAELGSYSGNELNDDYCTAEEAEFGGSSFSDKGGLTQFKKATSGGMVLVMSLWDDYYANMLWLDSTYPTNETSSTPGAVRGSCSTSSGVPAQVESQSPNAKVTFSNIKFGPIGSTGNPSGGNPPGGNPPGTTTTRRPATTTGSSPGPTQSHYGQCGGIGYSGPTVCASGTTCQVLNPYYSQCL

SEQ ID NO: 183 - protein, 497 aa, Trichoderma reesei
QSACTLQSETHPPLTWQKCSSGGTCTQQTGSVVIDANWRWTHATNSSTNCYDGNTWSSTLCPDNETCAKNCCLDGAAYASTYGVTTSGNSLSVGFVTQSAQKNVGARLYLMASDTTYQEFTLLGNEFSFDADVSQLPCGLNGALYFVSMDADGGVSKYPTNTAGAKYGTGYCDSQCPRDLKFINGQANVEGWEPSSNNANTGIGGHGSCCSEMDIWEANSISEALTPHPCTTVGQEICEGDGCGGTYSDNRYGGTCDPDGCDWNPYRLGNTSFYGPGSSFTLDTTKKLTVVTQFETSGAINRYYVQNGVTFQQPNAELGSYSGNELNDDYCTAEEAEFGGSSFSDKGGLTQFKKATSGGMVLVMSLWDDYYANMLWLDSTYPTNETSSTPGAVRGSCSTSSGVPAQVESQSPNAKVTFSNIKFGPIGSTGNPSGGNPPGGNPPGTTTTRRPATTTGSSPGPTQSHYGQCGGIGYSGPTVCASGTTCQVLNPYYSQCL

SEQ ID NO: 184 - protein, 497 aa, Trichoderma reesei
QSACTLQSETHPPLTWQKCSSGGTCTQQTGSVVIDANWRWTHATNSSTNCYDGNTWSSTLCPDNETCAKNCCLDGAAYASTYGVTTSGNSLSIGFVTQSAQRNVGARLYLMASDTTYQEFTLLGNEFSFNVDVSQLPCGLNGALYFVSMDADGGVSKYPTNTAGAKYGTGYCDSQCPRDLKFINGQANVEGWEPSSNNANTGIGGHGSCCSEMDIWEANSISEALTPHPCTTVGQEICEGDGCGGTYSDNRYGGTCDPDGCDWNPYRLGNTSFYGPGSSFTLDTTKKLTVVTQFETSGAINRYYVQNGVTFQQPNAELGSYSGNELNDDYCTAEEAEFGGSSFSDKGGLTQFKKATSGGMVLVMSLWDDYYANMLWLDSTYPTNETSSTPGAVRGSCSTSSGVPAQVESQSPNAKVTFSNIKFGPIGSTGNPSGGNPPGGNPPGTTTTRRPATTTGSSPGPTQSHYGQCGGIGYSGPTVCASGTTCQVLNPYYSQCL

SEQ ID NO: 185 - protein, 497 aa, Trichoderma reesei
QSACTLQSETHPPLTWQKCSSGGTCTQQTGSVVIDANWRWTHATNSSTNCYDGNTWSSTLCPDNETCAKNCCLDGAAYASTYGVTTSGNSLSIGFVTQSAQKNVGARIYLMASDTTYQEFTLLGNEFSFDVDVSQLPCGLNGALYFVSMDADGGVSKYPTNTAGAKYGTGYCDSQCPRDLKFINGQANVEGWEPSSNNANTGIGGHGSCCSEMDIWEANSISEALTPHPCTTVGQEICEGDGCGGTYSDNRYGGTCDPDGCDWNPYRLGNTSFYGPGSSFTLDTTKKLTVVTQFETSGAINRYYVQNGVTFQQPNAELGSYSGNELNDDYCTAEEAEFGGSSFSDKGGLTQFKKATSGGMVLVMSLWDDYYANMLWLDSTYPTNETSSTPGAVRGSCSTSSGVPAQVESQSPNAKVTFSNIKFGPIGSTGNPSGGDPPGGNPPGTTTTRRPATTTGSSPGPTQSHYGQCGGIGYSGPTVCASGTTCQVLNPYYSQCL

SEQ ID NO: 186 - protein, 497 aa, Trichoderma reesei
QSACTLQSETHPPLTWQKCSSGGTCTQQTGSVVIDANWRWTHATNSSTNCYDGNTWSSTLCPDNETCAKNCCLDGAAYASTYGVTTSGNSLSIGFVTQSAQKNVGARLYLTASDTTYQEFTLLGNEFSFDVDVSQLPCGLNGALYFVSMDADGGVSKYPTNTAGAKYGTGYCDSQCPRDLKFINGQANVEGWEPSSNNANTGIGGHGSCCSEMDIWEANSISEALTPHPCTTVGQEICEGDGCGGTYSDNRYGGTCDPDGCDWNPYRLGNTSFYGPGSSFTLDTTKKLTVVTQFETSGAINRYYVQNGVTFQQPNAELGSYSGNELNDDYCTAEEAEFGGSSFSDKGGLTQFKKATSGGMVLVMSLWDDYYANMLWLDSTYPTNETSSTPGAVRGSCSTSSGVPAQVESQSPNAKVTFSNIKFGPIGSTGNPSGSNPPGGNPPGTTTTRRPATTTGSSPGPTQSHYGQCGGIGYSGPTVCASGTTCQVLNPYYSQCL

SEQ ID NO: 187 - protein, 497 aa, Trichoderma reesei
QSACTLQSETHPPLTWQKCSSGGTCTQQTGSVVIDANWRWTHATNSSTNCYDGNTWSSTLCPDNETCAKNCCLDGAAYASTYGVTTSGNSLSIGFVTQSAQKNVGARLYLMASDTTYQEFTLLGNEFSFDVDVSQLSCGLNGALYFVSMDADGGVSKYPTNTAGAKYGTGYCDSQCPRDLKFINGQANVEGWEPSSNNANTGIGGHGSCCSEMDIWEANSISEALTPHPCTTVGQEICEGDGCGGTYSDNRYGGTCDPDGCDWNPYRLGNTSFYGPGSSFTLDTTKKLTVVTQFETSGAINRYYVQNGVTFQQPNAELGSYSGNELNDDYCTAEEAEFGGSSFSDKGGLTQFMKATSGGMVLVMSLWDDYYANMLWLDSTYPTNETSSTPGAVRGSCSTSSGVPAQVESQSPNAKVTFSNIKFGPIGSTGNPSGGNPPGGNPPGTTTTRRPATTTGSSPGPTQSHYGQCGGIGYSGPTVCASGTTCQVLNPYYSQCL

SEQ ID NO: 188 - protein, 497 aa, Trichoderma reesei
QSACTLQSETHPPLTWQKCSSGGTCTQQTGSVVIDANWRWTHATNSSTNCYDGNTWSSTLCPDNETCAKNCCLDGAAYASTYGVTTSGNSLSIGFVTQSAQKNVGARLYLMASDTTYQEFTLLGNEFSFDVDVSQLPCGLNGALYFVSMDADGGMSKYPTNTAGAKYGTGYCDSQCPRDLKFINGQANVEGWEPSSNNANTGIGGHGSCCSEMDIWEANSISEALTPHPCTTVGQEICEGDGCGGTYSDNRYGGTCDPDGCDWNPYRLGNTSFYGPGSSFTLDTTKKLTVVTQFETSGAINRYYVQNGVTFQQPNAELGSYSGNELNDDYCTAEEAEFGGSSFSDKGGLTQFKKATSGGMVLVMSLWDDYYANMLWLDSTYPTNETSSTPGAVRGSCSTSSGVPAQVESQSPNAKVTFSNIKFGPIGSTGNPSGGNPPGGNPPGTTTTRRPATTTGSSPGPTQSHYGQCGGIGYSGPTVCASGTTRQVLNPYYSQCL

SEQ ID NO: 189 - protein, 497 aa, Trichoderma reesei
QSACTLQSETHPPLTWQKCSSGGTCTQQTGSVVIDANWRWTHATNSSTNCYDGNTWSSTLCPDNETCAKNCCLDGAAYASTYGVTTSGNSLSIGFVTQSAQKNVGARLYLMASDTTYQEFTLLGNEFSFDVDVSQLPCGLNGALYFVSMDADGGVSKYPTNTAGAKYGTGYCDSQCPRDLKFNNGQANVEGWEPSSNNANTGIGGHGSCCSEMDIWEANSISEALTPHPCTTVGQEICEGDGCGGTYSDNRYGGTCDPDGCDWNPYRLGNTSFYGPGSSFTLDTTKKLTVVTQFETSGAINRYYVQNGVTFQQPNAELGSYSGNELNDDYCTAEEAEFGGSSFSDKGGLTQFKKATSGGMVLVMSLWDDYYANMLWLDSTYPTNETSSTPGAVRGSCSTSSGVPAQVESQSPNAKVTFSNIKFGPIGSTGNPSGGNPPGGNPPGTTSTRRPATTTGSSPGPTQSHYGQCGGIGYSGPTVCASGTTCQVLNPYYSQCL

SEQ ID NO: 190 - protein, 497 aa, Trichoderma reesei
QSACTLQSETHPPLTWQKCSSGGTCTQQTGSVVIDANWRWTHATNSSTNCYDGNTWSSTLCPDNETCAKNCCLDGAAYASTYGVTTSGNSLSIGFVTQSAQKNVGARLYLMASDTTYQEFTLLGNEFSFDVDVSQLPCGLNGALYFVSMDADGGVSKYPTNTAGAKYGTGYCDSQCPRDLKFINGKANVEGWEPSSNNANTGIGGHGSCCSEMDIWEANSISEALTPHPCTTVGQEICEGDGCGGTYSDNRYGGTCDPDGCDWNPYRLGNTSFYGPGSSFTLDTTKKLTVVTQFETSGAINRYYVQNGVTFQQPNAELGSYSGNELNDDYCTAEEAEFGGSSFSDKGGLTRFKKATSGGMVLVMSLWDDYYANMLWLDSTYPTNETSSTPGAVRGSCSTSSGVPAQVESQSPNAKVTFSNIKFGPIGSTGNPSGGNPPGGNPPGTTTTRRPATTTGSSPGPTQSHYGQCGGIGYSGPTVCASGTTCQVLNPYYSQCL

SEQ ID NO: 191 - protein, 497 aa, Trichoderma reesei
QSACTLQSETHPPLTWQKCSSGGTCTQQTGSVVIDANWRWTHATNSSTNCYDGNTWSSTLCPDNETCAKNCCLDGAAYASTYGVTTSGNSLSIGFVTQSAQKNVGARLYLMASDTTYQEFTLLGNEFSFDVDVSQLPCGLNGALYFVSMDADGGVSKYPTNTAGAKYGTGYCDSQCPRDLKFINGQANVEGWEPSSNNANTGIGGHGSCCSEMDIWEANSISEALTPHPCTTVGQEICEGDGCGGTYSDNRYRGTCDPDGCDWNPYRLGNTSFYGPGSSFTLDTTKKLTVVTQFETSGAINRYYVQNGVTFQQPNAELGSYSGNELNDDYCTAEEAEFGGSSFSDKGGLTQFKKATSGGMVLVMSLWDDYYANMLWLDSTYPTNETSSTPGAVRGSCSTSSGVPAQVESQSPNAKVTFSNIKFGPIGSTGNPSGGNPPGGNPPGTTTTRRPATTTGSSPGPTSSHYGQCGGIGYSGPTVCASGTTCQVLNPYYSQCL

SEQ ID NO: 192 - protein, 497 aa, Trichoderma reesei
QSACTLQSETHPPLTWQKCSSGGTCTQQTGSVVIDANWRWTHATNSSTNCYDGNTWSSTLCPDNETCAKNCCLDGAAYASTYGVTTSGNSLSIGFVTQSAQKNVGARLYLMASDTTYQEFTLLGNEFSFDVDVSQLPCGLNGALYFVSMDADGGVSKYPTNTAGAKYGTGYCDSQCPRDLKFINGQANVEGWEPSSNNANTGIGGHGSCCSEMDIWEANSISEALTPHPCTTVGQEICEGDGCGGTYSDNRYGGTCDPDDCDWNPYRLGNTSFYGPGSSFTLDTTKKLTVVTQFETSGAINRYYVQNGVTFQQPNAELGSYSGNELYDDYCTAEEAEFGGSSFSDKGGLTQFKKATSGGMVLVMSLWDDYYANMLWLDSTYPTNETSSTPGAVRGSCSTSSGVPAQVESQSPNAKVTFSNIKFGPIGSTGNPSGGNPPGGNPPGTTTTRRPATTTGSSPGPTQSHYGQCGGIGYSGPTVCASGTTCQVLNPYYSQCL

SEQ ID NO: 193 - protein, 497 aa, Trichoderma reesei
QSACTLQSETHPPLTWQKCSSGGTCTQQTGSVVIDANWRWTHATNSSTNCYDGNTWSSTLCPDNETCAKNCCLDGAAYASTYGVTTSGNSLSIGFVTQSAQKNVGARLYLMASDTTYQEFTLLGNEFSFDVDVSQLPCGLNGALYFVSMDADGGVSKYPTNTAGAKYGTGYCDSQCPRDLKFINGQANVEGWEPSSNNANTGIGGHGSCCSEMDIWEANSISEALTPHPCTTVGQEICEGDGCGGTYSDNRYGGTCDPDGCDWNPYRLGNTSFYGPGSSFALDTTKKLTVVTQFETSGAINRYYVQNGVTFQQPNAELGSYSGNELNDDYCTAEEAEFGGSSFSDKGGLTQFKKATSGGMVLVMSLWDDYYANMLWLDSTYPTNETSSTPGAVRGSCSTSSGVPAQVESQSPNAKVTFSNIKFGPIGSTGNPSGGNPPGGNPPGTTTTRRPATITGSSPGPTQSHYGQCGGIGYSGPTVCASGTTCQVLNPYYSQCL

SEQ ID NO: 194 - protein, 497 aa, Trichoderma reesei
QSACTLQSETHPPLTWQKCSSGGTCTQQTGSVVIDANWRWTHATNSSTNCYDGNTWSSTLCPDNETCAKNCCLDGAAYASTYGVTTSGNSLSIGFVTQSAQKNVGARLYLMASDTTYQEFTLLGNEFSFDVDVSQLPCGLNGALYFVSMDADGGVSKYPTNTAGAKYGTGYCDSQCPRDLKFINGQANVEGWEPSSNNANTGIGGHGSCCSEMDIWEANSISEALTPHPCTTVGQEICEGDGCGGTYSDNRYGGTCDPDGCDWNPYRLGNTSFYGPGSSFTLDTTEKLTVVTQFETSGAINRYYVQNGVTFQQPNAELGSYSGNELNDDYCTAEEAEFGGSSFSDKGGLTQFKKATSGGMVLVMSLWDDYYANMLWLDETYPTNETSSTPGAVRGSCSTSSGVPAQVESQSPNAKVTFSNIKFGPIGSTGNPSGGNPPGGNPPGTTTTRRPATTTGSSPGPTQSHYGQCGGIGYSGPTVCASGTTCQVLNPYYSQCL

SEQ ID NO: 195 - protein, 497 aa, Trichoderma reesei
QSACTLQSETHPPLTWQKCSSGGTCTQQTGSVVIDANWRWTHATNSSTNCYDGNTWSSTLCPDNETCAKNCCLDGAAYASTYGVTTSGNSLSIGFVTQSAQKNVGARLYLMASDTTYQEFTLLGNEFSFDVDVSQLPCGLNGALYFVSMDADGGVSKYPTNTAGAKYGTGYCDSQCPRDLKFINGQANVEGWEPSSNNANTGIGGHGSCCSEMDIWEANSISEALTPHPCTTVGQEICEGDGCGGTYSDNRYGGTCDPDGCDWNPYRLGNTSFYGPGSSFTLDTTKKLTVVTQFETSGAINRYYVQNGVTFQQPNAELGSYSGNELNDDYCIAEEAEFGGSSFSDKGGLTQFKKATSGGMVLVVSLWDDYYANMLWLDSTYPTNETSSTPGAVRGSCSTSSGVPAQVESQSPNAKVTFSNIKFGPIGSTGNPSGGNPPGGNPPGTTTTRRPATTTGSSPGPTQSHYGQCGGIGYSGPTVCASGTTCQVLNPYYSQCL

SEQ ID NO: 196 - protein, 497 aa, Trichoderma reesei
QSACTLQSETHPPLTWQKCSSGGTCTQQTGSVVIDANWRWTHATNSSTNCYDGNTWSSTLCPDNETCAKNCCLDGAAYASTYGVTTSGNSLSIGFVTQSAQKNVGARLYLMASDTTYQEFTLLGNEFSFDVDVSQLPCGLNGALYFVSMDADGGVSKYPTNTAGAKYGTGYCDSQCPRDLKFINGQANVEGWEPSSNNANTGIGGHGSCCSEMDIWEANSISEALTPHPCTTVGQEICEGDGCGGTYSDNRYGGTCDPDGCDWNPYRLGNTSFYGPGSSFTLDTTKKLTVVTQFETSGAINRYYVQNGVTFQQPNAELGSYSGNELNDDYCTAEEAEFGGSSFSDKGGLTQFKKATSSGMVLVMSLWDDYYANMLWLDSTYPTNETSSTCGAVRGSCSTSSGVPAQVESQSPNAKVTFSNIKFGPIGSTGNPSGGNPPGGNPPGTTTTRRPATTTGSSPGPTQSHYGQCGGIGYSGPTVCASGTTCQVLNPYYSQCL

SEQ ID NO: 197 - protein, 497 aa, Trichoderma reesei
QSACTLQSETHPPLTWQKCSSGGTCTQQTGSVVIDANWRWTHATNSSTNCYDGNTWSSTLCPDNETCAKNCCLDGAAYASTYGVTTSGNSLSIGFVTQSAQKNVGARLYLMASDTTYQEFTLLGNEFSFDVDVSQLPCGLNGALYFVSMDADGGVSKYPTNTAGAKYGTGYCDSQCPRDLKFINGQANVEGWEPSSNNANTGIGGHGSCCSEMDIWEANSISEALTPHPCTTVGQEICEGDGCGGTYSDNRYGGTCDPDGCDWNPYRLGNTSFYGPGSSFTLDTTKKLTVVTQFETSGAINRYYVQNGVTFQQPNAELGSYSGNELNDDYCTAEEAEFGGSSFSDKGGLTQFKKATSGGMVLVMSLWDDYYTNMLWLDSTYPTNETSSTPGAARGSCSTSSGVPAQVESQSPNAKVTFSNIKFGPIGSTGNPSGGNPPGGNPPGTTTTRRPATTTGSSPGPTQSHYGQCGGIGYSGPTVCASGTTCQVLNPYYSQCL

SEQ ID NO: 198 - protein, 497 aa, Trichoderma reesei
QSACTLQSETHPPLTWQKCSSGGTCTQQTGSVVIDANWRWTHATNSSTNCYDGNTWSSTLCPDNETCAKNCCLDGAAYASTYGVTTSGNSLSIGFVTQSAQKNVGARLYLMASDTTYQEFTLLGNEFSFDVDVSQLPCGLNGALYFVSMDADGGVSKYPTNTAGAKYGTGYCDSQCPRDLKFINGQANVEGWEPSSNNANTGIGGHGSCCSEMDIWEANSISEALTPHPCTTVGQEICEGDGCGGTYSDNRYGGTCDPDGCDWNPYRLGNTSFYGPGSSFTLDTTKKLTVVTQFETSGAINRYYVQNGVTFQQPNAELGSYSGNELNDDYCTAEEAEFGGSSFSDKGGLTQFKKATSGGMVLVMSLWDDYYANMLWLDSTYPTNETSSTPGAVRGSCSTSSGVPAQVESQSPNAKVTFSNIKFGPIGSTGNPSGGNPPGGNPPGTTTTRSPATTTGSSPGPTQSHYGQCGGIGYSGPTVCANGTTCQVLNPYYSQCL

SEQ ID NO: 199 - protein, 497 aa, Trichoderma reesei
QSACTLQSETHPHLTWQKCSSGGTCTQQTGSVVIDANWRWTHATNSSTNCYDGNTWSSTLCPDNETCAKNCCLDGAAYASTYGVTTSGNSLSIGFVTQSAQKNVGARLYLMASDTTYQEFTLLGNEFSFDVDVSQLPCGLNGALYFVSMDADGGVSKYPTNTAGAKYGTGYCDSQCPRDLKFINGQANVEGWEPSSNNANTGIGGHGSCCSEMDIWEANSISEALTPHPCTTVGQEICEGDGCGGTYSDNRYGGTCDPDGCDWNPYRLGNTSFYGPGSSFTLDTTKKLTVVTQFETSGAINRYYVQNGVTFQQPNAELGSYSGNELNDDYCTAEEAEFGGSSFSDKGGLTQFKKATSSGMVLVVSLWDDYYANMLWLDSTYPTNETSSTPGAVRGSCSTSSGVPAQVESQSPNAKVTFSNIKFGPIGSTGNPSGGNPPGGNPPGTTTTRRPATTTGSSPGPTQSHYGQCGGIGYSGPTVCASGTTCQVLNPYYSQCL

SEQ ID NO: 200 - protein, 497 aa, Trichoderma reesei
QSACTLQSETHPPLTWQKCSSGGTCTQQTGSVVIDANWRWTHATNSSTNCYDGNTWSSTLCPDNETCAKNCCLDGAAYASTYGVTTSGNSLSIGFVTQSAQKNVGARLYLMASETTYQEFTLLGNEFSFDVDVSQLPCGLNGALYFVSMNADGGVSKYPTNTAGAKYGTGYCDSQCPRDLKFINGQANVEGWEPSSNNANTGIGGHGSCCSEMDIWEANSISEALTPHPCTTVGQEICEGDGCGGTYSDNRYGGTCDPDGCDWNPYRLGNTSFYGPGSSFTLDTTKKLTVVTQFETSGAINRYYVQNGVTFQQPNAELGSYSGNELNDDYCTAEEAEFGGSSFSDKGGLTQFKKATSGGMVLVMSLWDDYYANMLWLDSTYPTNETSSTPGAVRGSCSTSSGVPAQVESQSPNAKVTFSNIKFGPIGSTGNPSGGNPPGGNPPGTTTTRRPASTTGSSPGPTQSHYGQCGGIGYSGPTVCASGTTCQVLNPYYSQCL

SEQ ID NO: 201 - protein, 497 aa, Trichoderma reesei
QSACTLQSETHPPLTWQKCSSGGTCTQQTGSVVIDANWRWTHATNSSTNCYDGNTWSSTLCPDNETCAKNCCLDGAAYASTYGVTTSGNSLSIGFVTQSAQKNVGARLYLMASDTTYQEFTLLGNEFSFDVDVSQLPCGLNGALYFVSMDADGGVSKYPTNTAGAKYGTGYCDSQCPRDLKFINGQANVEGWEPSSNNANTGIGGHGSCCTEMDIWEANSISEALTPHPCTTVGQEICEGDGCGGTYSDNRYGGTCDPDGCDWNPYRLGNTSFYGPGSSFTLDTTKKLTVVTQFETSGAINRYYVQNGVTFQQPNAELGSYSGNELNDDYCTAEEAEFGGSSFSDKGGLTQFKKATSGGMVLVMSLWDDYYANMLWLDSTYPTNETSSTPGAVRGSCSTSSGVPAQVESQSPNAKVTFSNIKFGPIGSTGNPSGGNPPGGNPPGTTTTRRPATTTGSSPGPTLSHYGQCGGIGYSGPTVCASGTTCQDLNPYYSQCL

SEQ ID NO: 202 - protein, 497 aa, Trichoderma reesei
QSACTLQSETHPPLTWQKCSSGGTCTQQTGSVVIDANWRWTHATNSSTNCYDGNTWSSTLCPDNETCAKNCCLDGAAYASTYGVTTSGNSLSIGFVTQSAQKNVGARLYLMASDTTYQEFTLLGNEFSFDVDVSQLPCGLNGALYFVSMDADGGVSKYPTNTAGAKYGTGYCDSQCPRDLKFINGQANVEGWEPSSNNANTGIGGHGSCCSEMDIWEANSISEALTPHPCTTVGQEICEGDGCGGTYSDNRYGGTCDPDGCDWNPYRLGNTSFYGPGSSFILDTTKKLTVVTQFETSGAINRYYVQNGVTFQQPNAELGSYSGNELNDDYCTAEEAEFGGSSFSDKGGLTQFKKATSGGMVLVMSLWDDYYANMLWLDSTYPTNETSSTPGAVRGSCSTSSGVPAQVESQSPNAKVTFSNIKFGPIGSTGNPSGGNPPGGNPPGTTTTRRPATTQGSSPGPTKSHYGQCGGIGYSGPTVCASGTTCQVLNPYYSQCL

SEQ ID NO: 203 - protein, 497 aa, Trichoderma reesei
QSACTLQSETHPPLTWQKCSSGGTCTQQTGSVVIDANWRWTHATNSSTNCYDGNTWSSTLCPDNETCAKNCCLDGAAYASTYGVTTSGNSLSIGFVTQSAQKNVGARLYLMASDTTYQEFTLLGNEFSFDVDVSQLPCGLNGALYFVSMDADGGVSKYPTNTAGAKYGTGYCDSQCPRDLKFINGQANVEGWEPSSNNANTGIGGHGSCCSEMDIWEANSISEALTPHPCTTVGQEICEGDGCGGTYSDNRYGGTCDPDGCDWNPYRLGNTSFYGPGSSFTLDTTKKLTVVTQFETSGAINRYYVQNGVTFQQPNAELGSYSGNELNDDYCTAEEAEFGGSSFSDKGGLTQFKKATSGGMVLVMSLWDDYYAYMLWLDSTYPTNETSSTPGAVRGSCSTSSGVPAQIESQSPNAKVTFSNIKFGPIGSTGNPSGGNPPGGNPPGTTTTRRPATTTGSSLGPTQSHYGQCGGIGYSGPTVCASGTTCQVLNPYYSQCL

SEQ ID NO: 204 - protein, 497 aa, Trichoderma reesei
QSACTLQSETHPPLTWQKCSSGGTCTQQTGSVVIDANWRWTHATNSSTNCYDGNTWSSTLCPDNETCAKNCCLDGAAYASTYGVTTSGNSLSIGFVTQSAQKNVGARLYLMASDTTYQEFTLLGNEFSFDVDVSQLPCGLNGALYFVSMDADGGVSKYPTNTAGAKYGTGYCDSQCPRDLKFINGQANVEGWEPSSNNANTGIGGHGSCCSEMDIWEANSISEALTPHPCTTVGQEICEGDGCGGTYSDNRYGGTCDPDGCDWNPYRLGNTSFYGPGSSFTLDTTKKLTVVTQFETSGAINRYYVQNGVTFQQPNAELGSYSGNELNDDYCTAEEAEFGGSSFSDKGGLTQFKKATSGGMVLVMSLWDDYYANMLWLDSTYPTNETSSTPGAVRGSCSTSSGVPAQVESQSPNAKVTFSDIKFGPIGSTGNPSGGNPPGGNPPDTTTTRRPATTTGSSPGPTQSHYGQCGGIGYSGPTVCASGTTCQVPNPYYSQCL

SEQ ID NO: 205 - protein, 497 aa, Trichoderma reesei
QSACTLQSETHPPLTWQKCSSGGTCTQQTGSVVIDANWRWTHATNASTNCYDGNTWSSTLCPDNETCAKNCCLDGAAYASTYGVTTSGNSLSIGFVTQSAQKNVGARLYLMASDTTYQEFTLLGNEFSFDVDVSQLPCGLNGALYFVSMDADGGVSKYPTNTAGAKYGTGYCDSQCPRDLKFINGQANVEGWGPSSNNANTGIGGHGSCCSEMDIWEANSISEALTPHPCTTVGQEICEGDGCGGTYSDNRYGGTCDPDGCDWNPYRLGNTSFYGPGSSFTLDTTKKLTVVTQFETSGAINRYYVQNGVTLQQPNAELGSYSGNELNDDYCTAEEAEFGGSSFSDKGGLTQFKKATSGGMVLVMSLWDDYYANMLWLDSTYPSNETSSTPGAVRGSCSTSSGVPAQVESQSPNAKVTFSNIKFGPIGSTGNPSGGNPPGGNPPGTTTTRRPATTTGSSPGPTQSHYGQCGGIGYSGPTVCASGTTCQVLNPYYSQCL

SEQ ID NO: 206 - protein, 497 aa, Trichoderma reesei
QSACILQSETHPPLTWQKCSSGGTCAQQTGSVVIDANWRWTHATNSSTNCYDGNTWSSTLCPDNETCAKNCCLDGAAYASTYGVTTSGNSLSIGFVTQSAQKNVGARLYLMASDTTYQEFTLLGNEFSFDVDVSQLPCGLNGALYFVSMDADGGVSKYPTNTAGAKYGTGYCDSQCPRDLKFINGQANVEGWEPSSNNANTGIGGHGSCCSEMDIWEANSISEALTPHPCTTVGQEICEGDGCGGTYSDNRYGGTCDPDGCDWNPYRLGNTSFYGPGSSFTLDTTKKLTVVTQFETSGAINRYYVQNGVTFQQPNAELGSYSGNKLNDDYCTAEEAEFGGSSFSDKGGLTQFKKAISGGMVLVMSLWDDYYANMLWLDSTYPTNETSSTPGAVRGSCSTSSGVPAQVESQSPNAKVTFSNIKFGPIGSTGNPSGGNPPGGNPPGTTTTRRPATTTGSSPGPTQSHYGQCGGIGYSGPTVCASGTTCQVLNPYYSQCL

SEQ ID NO: 207 - protein, 497 aa, Trichoderma reesei
QSACTLQSETHPPLTWQKCSSGGTCTQQTGSVVIDANWRWTHATNSSTNCYDGNTWSSTLCPDNETCAKNCCLDGAAYASTYGVTTSGNSLSIGFVTQSAQKNVGARLYLMASDTTYQEFTLLGNEFSFDVDVSQLPCGLNGALYFVSMDADGGVSKYPTNTAGAKYGTGYCDSQCPRDLKFINGQANVEGWEPSSNNANTGIGGHGSSCSEMDIWEANSISEALTPHPCTTVGQEICEGDGCGGTYSDNRYGGTCDPDGCDWNTYRLGNTSFYGPGSSFTLDTTKKLTVVTQFETSGAINRYYVQNGVTFQQPNAELGSYSGNELNDDYCTAEEAEFGGSSFSDKGGLTQFKKATSGGMVLVMSLWDDYYANMLWLESTYPTNETSSTPGAVRGSCSTSSGVPAQVESQSPNAKVTFSNIKFGPIGSTGNPSGGNPPGGNPPGITTTRRPATTTGSSPGPTQSHYGQCGGIGYSGPTVCASGTTCQVLNPYYSQCL

SEQ ID NO: 208 - protein, 497 aa, Trichoderma reesei
QSACTLQSETHPPLTWQKCSSGGTCTQQTGSVVIDANWRWTHATNSSTNCYDGNTWSSTLCPDNETCAKNCCLDGAAYASTYGVTTSGNSLSIGFVTQSAQKNVGARLYLMASDTTYQEFTLLGNEFSFDVDVSQLPCGLNGALYFVSMDADGGVSKYPTNTAGAKYGTGYCDSQCPRDLKFINGQANVEGWEPSSNNANTGIGGHGSCCSEIDIWEANSISEALTPHPCTTVGQEICEGDGCGGTYSDNRYGGTCDPDGCDWNPYRLGNTSFYGPGSSFTLDTTKKLTVVTQFETSGAINRYYVQNGVTFQQPNAELGSYSGNELNDDYCTAEEAEFGGSSFSDKGGLTQFKKATSGGMVLVMSLWDDYYANMLWLDSTYPTNETSSTPGAVRGSCSTSSGVPAPVESQSPNAKVTFSNIKYGPIGSTGNPSGGNPPGGNPPGTATTRRPATTTGSSPGPTQSHYGQCGGIGYSGPTVCASGTTCQVLNPYYSQCL

SEQ ID NO: 209 - protein, 497 aa, Trichoderma reesei
QSACTLQSETHPPLTWQKCSSGGTCTQQTGSVVIDANWRWTHATNSSTNCYDGNTWSSTLCPDNETCAKNCCLDGAAYASTYGVTTSGNSLSIGFVTQSAQKNVGARLYLMASDTTYQEFTLLGNEFSFDVDVSQLPCGLNGALYFVSMDADGGVSKYPTNTAGAKYGTGYCDSQCPRDLKFINGQANVEGWEPSSNNANTGIGGHGSCCSEMDIWEANSISEALTPHPCTTVGQEICEGDGCGGTYSDNRYGGTCDPDGCDWNPYRLGNTSFYGPGSSFTLDTTKKLTVVTQFETSGAINRYYVQNGVTFQQPNVELGSYSGNELNDDYCTAEEAEFGGSSFSDKGGLTQFKKATSGGMVLVMSLWDDYYANMLWLDSTYPANETSSTPGAVRGSCSTSSGVPAQVESQSPNAKVTFSNIKFGPIGSTGNPSGGNTPGGNPPGTTTTRRPATTTGSSPGPTQSHYDQCGGIGYSGPTVCASGTTCQVLNPYYSQCL

SEQ ID NO: 210 - protein, 497 aa, Trichoderma reesei
QSACTLQSETHPPLTWQKCSSGGTCTQQTGSVVIDANWRWTHATNSSTNCYDGNTWSSTLCPDNETCAKNCCLDGAAYASTYGVTTSGNSLSIGFVTQSAQKNVGARLYLMASDTTYQEFTLLGNEFSFDVDVSQLPCGLNGALYFVSMDADGGVSKYPTNTAGAKYGTGYCDSQCPRDLKFINGQANVEGWEPSSNNANTGIGGHGSCCSEMDIWEANSISEALTPHPCTTVGQEICEGDGCGGTYSDNRYGGTCDPDGCDWNPYRLGNTSFYGPGSSFTLDTTKKLTVVTQFETSGAINRYYVQNGVTFQQPNAELGSYSGNELNDDYCTAEEAEFGGSSFSDKGGLTQFKKATSGGMVLVMSLWDDYYANMLWLDSTYPTNETSSTPGAVRGSCSTSSGVPAQVESQSPNAKVTFSNIKFGPIGSTGNPSGGNPPGGDPPGTTTTRRPAITTGSSPGPTQSHYGQCGGIGYSGPTVCASSTTCQVQNPYYSQCL

SEQ ID NO: 211 - protein, 497 aa, Trichoderma reesei
QSACTLQSETHPPLTWQKCSSGGTCTQQTGSVVIDANWLWTHATNSSTNCYDGSTWSSTLCPDNETCAKNCCLDGAAYASTYGVTTSVNSLSIGFVTQSAQKNVGARLYLMASDTTYQEFTLLGNEFSSDVDVSQLPCGLNGALYFVSMDADGGVSKYPTNTAGAKYGTGYCDSQCPRDLKFINGQANVEGWEPSSNNANTGIGGHGSCCSEMDIWEANSISEALTPHPCTTVGQEICEGDGCGGSYSDNRYGGTCDPDGCDWNPYRLGNISFYGPGSSFTLDTTKKLTVVTQFETSGAINRYYVQNGVTFQQPNAELGSYSGDELNDDYCTAEEAEFGGSSFSDKGGLTQFKKATSGGMVLVMSLWDDYYANMLWLDSTYPTNETSSTPGAVRGSCPTSSGVPAQVESQSPNAKVTFSNIKFGPIGSTGNPSGGNPPGGNPPGTTTTRRPATTTGSSPGPTQSHYGQCGGIGYSGPTVCASGTTCQVLNPYYSQCL

SEQ ID NO: 212 - protein, 506 aa, Trichoderma reesei
QSACTLQSETHPPLTWQKCSSGGTCTQQTGSVVIDANWRWTHATNSSTNCYDGNTWSSTLCPDNETCAKNCCLDGAAYASTYGVTTSGNSLSIGFVTQSAQKNVGARLYLMASDTTYQEFTLLGNEFSFDVDVSQLPCGLNGALYFVSMDADGGVSKYPTNTAGAKYGTGYCDSQCPRDLKFINGQANVEGWEPSSNNANTGIGGHGSCCSEMDIWEANSISEALTPHPCTTVGQEICEGDGCGGTYSDNRYGGTCDPDGCDWNPYRLGNTSFYGPGSSFTLDTTKKLTVVTQFETSGAINRYYVQNGVTFQQPNAELGSYSGNELNDDYCTAEEAEFGGSSFSDKGGLTQFKKATSGGMVLVMSLWDDYYANMLWLDSTYPTNETSSTPGAVRGSCSTSSGVPAQVESQSPNAKVTFSNIKFGPIGSTGNPSGGNPPGGNPPGTTTTRRPATTTGSSPGPTQSHYGQCGGIGYSGPTVCASVTTCQVLNPYYSQCLYGTSSVAKA

SEQ ID NO: 213 - protein, 485 aa, Trichoderma reesei
QSACTLQSETHPPLTWQKCSSGGTCTQQTGSVVIDANWRWTHATNSSTNCYDGNTWSSALCPDNETCAKNCCLDGAAYASTYGVTTSGNSLSIGFVTQSAQKNVGARLYLMASDTTYQEFTLLGNEFSFDVDVSQLPCGLNGALYFVSMDADGGVGKYPTNTAGAKYGTGYCDSQCPRDLKFINGQANVEGWEPSSNNANTGIGGHGSCCSEMDIWEANSISEALTPHPCTTVGQEICEGDGCGGTYSDNRYGGTCDPDGCDWNPYRLGNTSFYGPGSSFTLDTTKKLTVVTQFETSGAINRYYVQNGVTFQQPNAELGSYSGNELNDDYCTAEEAEFGGSSFSDKGGLTQFKKATSGGMVLVMSLWDDYYANMLWLDSTYPTNETSSTPGAVRGSCSTSSGVPAQVESQSPNAKVTFSNIKFGPIGSTGNPSGGNPPGGNPPGTTTTRRPATTTGSSPGPTQSHYGQCGGIGYSGPTVCASGTT

SEQ ID NO: 214 - protein, 485 aa, Trichoderma reesei
QSACTLQSETHPPLTWQKCSSGGTCTQQTGSVVIDANWRWTHATNSSTNCYDGNTWSSTLCPDNETCAKNCCLDSAAYASTYGVTTSGNSLSIGFVTQSAQKNVGARLYLMASDTTYQEFTLLGNEFSFDVDVSQLPCGLNGALYFVSMDADGGVSKYPTNTAGAKYGTGYCDSQCPRDLKFINGQANVEGWEPSSNNANTGIGGHGSCCSEMDIWEANSISEALTPHPCTTVGQEICEGDGCGGTYSDNRYGGTCDPDGCDWNPYRLGNTSFYGPGSSFTLDTTKKLTVVTQFETSGAINRYYVQNGVTFQQPNAELGSYSGNELNDDYCTAEEAEFGGSSFSDKGGLTQFKKATSGGMVLVMSLWDDYYANMLWLDSTYPTNETSSTPGAVRGSCSTGSGVPAQVESQSPNAKVTFSNIKFGPIGSTGNPSGGNPPGGNPPGTTTTRRPATTTGSSPGPTQSHYGQCGGIGYSGPTVCASGTT

SEQ ID NO: 215 - protein, 510 aa, Trichoderma reesei
QSACTLQSETHPPLTWQKCSSGGTCTQQTGSVVIDANWRWTHATNSSTNCYDGNTWSSTLCPDNETCAKNCCLDGAAYASTYGVTTSGNSLSIGFVTQSAQKNVGARLYLMASDTTYQEFTLLGNEFSFDVDVSQLPCGLNGALYFVSMDADGGVSKYPTNTAGAKYGTGYCDSQCPRDLKFINGQANVEGWEQSSNNANTGIGGHGSCCSEMDIWEANSISEALTPHPCTTVGQEICEGDGCGGTYSDNRYGGTCDPDGCDWNPYRLGNTSFYGPGSSFTLDTTKKLTVVTQFETSGAINRYYVQNGVTFQQPNAELGSYSGNELNDDYCTAEEAEFGGSSFSDKGGLTQFKKATSGGMVLVMSLWDDYYANMLWLDSTYPTNETSSTPGAVRGSCSTSSGVPAQVESQSPNAKVTFSNIKFGPIGSTGNPSGGNPPGGNPPGTTTTRRPATTTGSSPGPTQSHYGQCGGIGYSGPTGLRQRHNLPGPEPLLLSVPVRYQLRGESLTHR

SEQ ID NO: 216 - protein, 467 aa, Trichoderma reesei
QSACTLQSETHPPLTWQKCSSGGTCTQQTGSVVIDANWRWTHATNSSTNCYDGNTWSSTLCPDNETCAKNCCLDGAAYASTYGVTTSGNSLSIGFVTQSAQKNVGARLYLMASDTTYQEFTLLGNEFSFDVDVSQLPCGLNGALYFVSMDADGGVSKYPTNTAGAKYGTGYCDSQCPRDLKFINGQANVEGWEPSSANANTGIGGHGSCCSEMDIWEANSISEALTPHPCTTVGQEICEGDGCGGTYSDNRYGGTCDPDGCDWNPYRLGNTSFYGPGSSFTLDTTKKLTVVTQFETSGAINRYYVQNGVTFQQPNAELGSYSGNELNDDYCTAEEAEFGGSSFSDKGGLTQFKKATSGGMVLVMSLWDDYYANMLWLDSTYPTNETSSTPGAVRGSCSTSSGVPAQVESQSPNAKVTFSNIKFGPIGSTGNPSGGNPPGGNPPGTTTTRRPATTTGSSPGPTQSHYG

SEQ ID NO: 217 - protein, 488 aa, Trichoderma reesei
QSACTLQSETHPPLTWQKCSSGGTCTQQTGSVVIDANWRWTHATNSSTNCYDGNTWSSTLCPDNETCAKNCCLDGAAYASTYGVTTSGNSLSIGFVTQSAQKNVGARLYLMASDTTYQEFTLLGNEFSFDVDVSQLPCGLNGALYFVSMDADGGVSKYPTNTAGAKYGTGYCDSQCPRDLKFINGQANVEGWEPSSNNANTGIGGHGSCCSEMDIWEANSISEALTPHPCTTVGQEICEGDGCGGTYSNNRYGGTCDPDGCDWNPYRLGNTSFYGPGSSFTLDTTKKLTVVTQFETSGAINRYYVQNGVTFQQPNAELGSYSGNELNDDYCTAEEAEFGGSSFSDKGGLTQFKKATSGGMVLVMSLWDDYYANMLWLDSTYPTNETSSTPGAVRGSCSTSSGVPAQVESQSPNAKVTFSNIKFGPIGSTGNPSGGNPPGGNPPGTTTTRRPATTTGSSPGPTQSHYGQCGGIGYSGPTVCASGTTCRS

SEQ ID NO: 218 - protein, 509 aa, Myceliophthora thermophila
QNACTLTAENHPHLTWSKCTSGGSCTSVQGSITIDANWRWTHRTDSATNCYEGNKWDTSYCSDGPSCASKCCIDGADYSSTYGITTSGNSLNLKFVTKGQYSTNIGSRTYLMESDTKYQMFQLLGNEFTFDVDVSNLGCGLNGALYFVSMDADGGMSKYSGNKAGAKYGTGYCDSQCPRDLKFINGEANVENWQSSTNDANAGTGKYGSCCSEMDVWEANNMAAAFTPHPCTVIGQSRCEGDSCGGTYSTDRYAGICDPDGCDFNSYRQGNKTFYGKGMTVDTTKKITVVTQFLKNSAGELSEIKRFYVQNGKVIPNSESTIPGVEGNSITQDWCDRQKAAFGDVTDFQDKGGMVQMGKALAGPMVLVMSIWDDHAVNMLWLDSTWPIDGAGKPGAERGACPTTSGVPAEVEAEAPNSNVIFSNIRFGPIGSTVSGLPDGGSGNPNPPVSSSTPVPSSSTTSSGSSGPTGGTGVAKHYEQCGGIGFTGPTQCESPYTCTKLNDWYSQCL

SEQ ID NO: 219 - protein, 509 aa, Myceliophthora thermophila
QNACTLTAENHPTLTWSKCTSGGSCTSVQGSITIDANWRWTHRTDSATNCYEGNKWDTSYCSDGPSCASKCCIDGADYSSTYGITTSGNSLNLKFVTKGQYSTNIGSRTYLMESDTKYQMFQLLGNEFTFDVDVSNLGCGLNGALYFVSMDADGGMSKYSGNKAGAKYGTGYCDSQCPRDLKFINGEANVENWQSSTNDANAGTGKYGSCCSEMDVWEANNMAAAFTPHPCTVIGQSRCEGDSCGGTYSTDRYAGICDPDGCDFNSYRQGNKTFYGKGMTVDTTKKITVVTQFLKNSAGELSEIKRFYVQNGKVIPNSESTIPGVEGNSITQDWCDRQKAAFGDVTDFQDKGGMVQMGKALAGPMVLVMSIWDDHAVNMLWLDSTWPIDGAGKPGAERGACPTTSGVPAEVEAEAPNSNVIFSNIRFGPIGSTVSGLPDGGSGNPNPPVSSSTPVPSSSTTSSGSSGPTGGTGVAKHYEQCGGIGFTGPTQCESPYTCTKLNDWYSQCL

SEQ ID NO: 220 - protein, 509 aa, Myceliophthora thermophila
QNACTLTAENHPSLTWSKCTSDGSCTSVQGSITIDANWRWTHRTDSATNCYEGNKWDTSYCSDGPSCASKCCIDGADYSSTYGITTSGNSLNLKFVTKGQYSTNIGSRTYLMESDTKYQMFQLLGNEFTFDVDVSNLGCGLNGALYFVSMDADGGMSKYSGNKAGAKYGTGYCDSQCPRDLKFINGEANVENWQSSTNDANAGTGKYGSCCSEMDVWEANNMAAAFTPHPCTVIGQSRCEGDSCGGTYSTDRYAGICDPDGCDFNSYRQGNKTFYGKGMTVDTTKKITVVTQFLKNSAGELSEIKRFYVQNGKVIPNSESTIPGVEGNSITQDWCDRQKAAFGDVTDFQDKGGMVQMGKALAGPMVLVMSIWDDHAVNMLWLDSTWPIDGAGKPGAERGACPTTSGVPAEVEAEAPNSNVIFSNIRFGPIGSTVSGLPDGGSGNPNPPVSSSTPVPSSSTTSSGSSGPTGGTGVAKHYEQCGGIGFTGPTQCESPYTCTKLNDWYSQCL

SEQ ID NO: 221 - protein, 509 aa, Myceliophthora thermophila
QNACTLTAENHPSLTWSKCTSGGSCASVQGSITIDANWRWTHRTDSATNCYEGNKWDTSYCSDGPSCASKCCIDGADYSSTYGITTSGNSLNLKFVTKGQYSTNIGSRTYLMESDTKYQMFQLLGNEFTFDVDVSNLGCGLNGALYFVSMDADGGMSKYSGNKAGAKYGTGYCDSQCPRDLKFINGEANVENWQSSTNDANAGTGKYGSCCSEMDVWEANNMAAAFTPHPCTVIGQSRCEGDSCGGTYSTDRYAGICDPDGCDFNSYRQGNKTFYGKGMTVDTTKKITVVTQFLKNSAGELSEIKRFYVQNGKVIPNSESTIPGVEGNSITQDWCDRQKAAFGDVTDFQDKGGMVQMGKALAGPMVLVMSIWDDHAVNMLWLDSTWPIDGAGKPGAERGACPTTSGVPAEVEAEAPNSNVIFSNIRFGPIGSTVSGLPDGGSGNPNPPVSSSTPVPSSSTTSSGSSGPTGGTGVAKHYEQCGGIGFTGPTQCESPYTCTKLNDWYSQCL

SEQ ID NO: 222 - protein, 509 aa, Myceliophthora thermophila
QNACTLTAENHPSLTWSKCTSGGSCSSVQGSITIDANWRWTHRTDSATNCYEGNKWDTSYCSDGPSCASKCCIDGADYSSTYGITTSGNSLNLKFVTKGQYSTNIGSRTYLMESDTKYQMFQLLGNEFTFDVDVSNLGCGLNGALYFVSMDADGGMSKYSGNKAGAKYGTGYCDSQCPRDLKFINGEANVENWQSSTNDANAGTGKYGSCCSEMDVWEANNMAAAFTPHPCTVIGQSRCEGDSCGGTYSTDRYAGICDPDGCDFNSYRQGNKTFYGKGMTVDTTKKITVVTQFLKNSAGELSEIKRFYVQNGKVIPNSESTIPGVEGNSITQDWCDRQKAAFGDVTDFQDKGGMVQMGKALAGPMVLVMSIWDDHAVNMLWLDSTWPIDGAGKPGAERGACPTTSGVPAEVEAEAPNSNVIFSNIRFGPIGSTVSGLPDGGSGNPNPPVSSSTPVPSSSTTSSGSSGPTGGTGVAKHYEQCGGIGFTGPTQCESPYTCTKLNDWYSQCL

SEQ ID NO: 223 - protein, 509 aa, Myceliophthora thermophila
QNACTLTAENHPSLTWSKCTSGGSCTLVQGSITIDANWRWTHRTDSATNCYEGNKWDTSYCSDGPSCASKCCIDGADYSSTYGITTSGNSLNLKFVTKGQYSTNIGSRTYLMESDTKYQMFQLLGNEFTFDVDVSNLGCGLNGALYFVSMDADGGMSKYSGNKAGAKYGTGYCDSQCPRDLKFINGEANVENWQSSTNDANAGTGKYGSCCSEMDVWEANNMAAAFTPHPCTVIGQSRCEGDSCGGTYSTDRYAGICDPDGCDFNSYRQGNKTFYGKGMTVDTTKKITVVTQFLKNSAGELSEIKRFYVQNGKVIPNSESTIPGVEGNSITQDWCDRQKAAFGDVTDFQDKGGMVQMGKALAGPMVLVMSIWDDHAVNMLWLDSTWPIDGAGKPGAERGACPTTSGVPAEVEAEAPNSNVIFSNIRFGPIGSTVSGLPDGGSGNPNPPVSSSTPVPSSSTTSSGSSGPTGGTGVAKHYEQCGGIGFTGPTQCESPYTCTKLNDWYSQCL

SEQ ID NO: 224 - protein, 509 aa, Myceliophthora thermophila
QNACTLTAENHPSLTWSKCTSGGSCTSVQGSITIDANWLWTHRTDSATNCYEGNKWDTSYCSDGPSCASKCCIDGADYSSTYGITTSGNSLNLKFVTKGQYSTNIGSRTYLMESDTKYQMFQLLGNEFTFDVDVSNLGCGLNGALYFVSMDADGGMSKYSGNKAGAKYGTGYCDSQCPRDLKFINGEANVENWQSSTNDANAGTGKYGSCCSEMDVWEANNMAAAFTPHPCTVIGQSRCEGDSCGGTYSTDRYAGICDPDGCDFNSYRQGNKTFYGKGMTVDTTKKITVVTQFLKNSAGELSEIKRFYVQNGKVIPNSESTIPGVEGNSITQDWCDRQKAAFGDVTDFQDKGGMVQMGKALAGPMVLVMSIWDDHAVNMLWLDSTWPIDGAGKPGAERGACPTTSGVPAEVEAEAPNSNVIFSNIRFGPIGSTVSGLPDGGSGNPNPPVSSSTPVPSSSTTSSGSSGPTGGTGVAKHYEQCGGIGFTGPTQCESPYTCTKLNDWYSQCL

SEQ ID NO: 225 - protein, 509 aa, Myceliophthora thermophila
QNACTLTAENHPSLTWSKCTSGGSCTSVQGSITIDANWRWTHRTDAATNCYEGNKWDTSYCSDGPSCASKCCIDGADYSSTYGITTSGNSLNLKFVTKGQYSTNIGSRTYLMESDTKYQMFQLLGNEFTFDVDVSNLGCGLNGALYFVSMDADGGMSKYSGNKAGAKYGTGYCDSQCPRDLKFINGEANVENWQSSTNDANAGTGKYGSCCSEMDVWEANNMAAAFTPHPCTVIGQSRCEGDSCGGTYSTDRYAGICDPDGCDFNSYRQGNKTFYGKGMTVDTTKKITVVTQFLKNSAGELSEIKRFYVQNGKVIPNSESTIPGVEGNSITQDWCDRQKAAFGDVTDFQDKGGMVQMGKALAGPMVLVMSIWDDHAVNMLWLDSTWPIDGAGKPGAERGACPTTSGVPAEVEAEAPNSNVIFSNIRFGPIGSTVSGLPDGGSGNPNPPVSSSTPVPSSSTTSSGSSGPTGGTGVAKHYEQCGGIGFTGPTQCESPYTCTKLNDWYSQCL

SEQ ID NO: 226 - protein, 509 aa, Myceliophthora thermophila
QNACTLTAENHPSLTWSKCTSGGSCTSVQGSITIDANWRWTHRTDGATNCYEGNKWDTSYCSDGPSCASKCCIDGADYSSTYGITTSGNSLNLKFVTKGQYSTNIGSRTYLMESDTKYQMFQLLGNEFTFDVDVSNLGCGLNGALYFVSMDADGGMSKYSGNKAGAKYGTGYCDSQCPRDLKFINGEANVENWQSSTNDANAGTGKYGSCCSEMDVWEANNMAAAFTPHPCTVIGQSRCEGDSCGGTYSTDRYAGICDPDGCDFNSYRQGNKTFYGKGMTVDTTKKITVVTQFLKNSAGELSEIKRFYVQNGKVIPNSESTIPGVEGNSITQDWCDRQKAAFGDVTDFQDKGGMVQMGKALAGPMVLVMSIWDDHAVNMLWLDSTWPIDGAGKPGAERGACPTTSGVPAEVEAEAPNSNVIFSNIRFGPIGSTVSGLPDGGSGNPNPPVSSSTPVPSSSTTSSGSSGPTGGTGVAKHYEQCGGIGFTGPTQCESPYTCTKLNDWYSQCL

SEQ ID NO: 227 - protein, 509 aa, Myceliophthora thermophila
QNACTLTAENHPSLTWSKCTSGGSCTSVQGSITIDANWRWTHRTDLATNCYEGNKWDTSYCSDGPSCASKCCIDGADYSSTYGITTSGNSLNLKFVTKGQYSTNIGSRTYLMESDTKYQMFQLLGNEFTFDVDVSNLGCGLNGALYFVSMDADGGMSKYSGNKAGAKYGTGYCDSQCPRDLKFINGEANVENWQSSTNDANAGTGKYGSCCSEMDVWEANNMAAAFTPHPCTVIGQSRCEGDSCGGTYSTDRYAGICDPDGCDFNSYRQGNKTFYGKGMTVDTTKKITVVTQFLKNSAGELSEIKRFYVQNGKVIPNSESTIPGVEGNSITQDWCDRQKAAFGDVTDFQDKGGMVQMGKALAGPMVLVMSIWDDHAVNMLWLDSTWPIDGAGKPGAERGACPTTSGVPAEVEAEAPNSNVIFSNIRFGPIGSTVSGLPDGGSGNPNPPVSSSTPVPSSSTTSSGSSGPTGGTGVAKHYEQCGGIGFTGPTQCESPYTCTKLNDWYSQCL

SEQ ID NO: 228 - protein, 509 aa, Myceliophthora thermophila
QNACTLTAENHPSLTWSKCTSGGSCTSVQGSITIDANWRWTHRTDTATNCYEGNKWDTSYCSDGPSCASKCCIDGADYSSTYGITTSGNSLNLKFVTKGQYSTNIGSRTYLMESDTKYQMFQLLGNEFTFDVDVSNLGCGLNGALYFVSMDADGGMSKYSGNKAGAKYGTGYCDSQCPRDLKFINGEANVENWQSSTNDANAGTGKYGSCCSEMDVWEANNMAAAFTPHPCTVIGQSRCEGDSCGGTYSTDRYAGICDPDGCDFNSYRQGNKTFYGKGMTVDTTKKITVVTQFLKNSAGELSEIKRFYVQNGKVIPNSESTIPGVEGNSITQDWCDRQKAAFGDVTDFQDKGGMVQMGKALAGPMVLVMSIWDDHAVNMLWLDSTWPIDGAGKPGAERGACPTTSGVPAEVEAEAPNSNVIFSNIRFGPIGSTVSGLPDGGSGNPNPPVSSSTPVPSSSTTSSGSSGPTGGTGVAKHYEQCGGIGFTGPTQCESPYTCTKLNDWYSQCL

SEQ ID NO: 229 - protein, 509 aa, Myceliophthora thermophila
QNACTLTAENHPSLTWSKCTSGGSCTSVQGSITIDANWRWTHRTDSATNCIEGNKWDTSYCSDGPSCASKCCIDGADYSSTYGITTSGNSLNLKFVTKGQYSTNIGSRTYLMESDTKYQMFQLLGNEFTFDVDVSNLGCGLNGALYFVSMDADGGMSKYSGNKAGAKYGTGYCDSQCPRDLKFINGEANVENWQSSTNDANAGTGKYGSCCSEMDVWEANNMAAAFTPHPCTVIGQSRCEGDSCGGTYSTDRYAGICDPDGCDFNSYRQGNKTFYGKGMTVDTTKKITVVTQFLKNSAGELSEIKRFYVQNGKVIPNSESTIPGVEGNSITQDWCDRQKAAFGDVTDFQDKGGMVQMGKALAGPMVLVMSIWDDHAVNMLWLDSTWPIDGAGKPGAERGACPTTSGVPAEVEAEAPNSNVIFSNIRFGPIGSTVSGLPDGGSGNPNPPVSSSTPVPSSSTTSSGSSGPTGGTGVAKHYEQCGGIGFTGPTQCESPYTCTKLNDWYSQCL

SEQ ID NO: 230 - protein, 509 aa, Myceliophthora thermophila
QNACTLTAENHPSLTWSKCTSGGSCTSVQGSITIDANWRWTHRTDSATNCYRGNKWDTSYCSDGPSCASKCCIDGADYSSTYGITTSGNSLNLKFVTKGQYSTNIGSRTYLMESDTKYQMFQLLGNEFTFDVDVSNLGCGLNGALYFVSMDADGGMSKYSGNKAGAKYGTGYCDSQCPRDLKFINGEANVENWQSSTNDANAGTGKYGSCCSEMDVWEANNMAAAFTPHPCTVIGQSRCEGDSCGGTYSTDRYAGICDPDGCDFNSYRQGNKTFYGKGMTVDTTKKITVVTQFLKNSAGELSEIKRFYVQNGKVIPNSESTIPGVEGNSITQDWCDRQKAAFGDVTDFQDKGGMVQMGKALAGPMVLVMSIWDDHAVNMLWLDSTWPIDGAGKPGAERGACPTTSGVPAEVEAEAPNSNVIFSNIRFGPIGSTVSGLPDGGSGNPNPPVSSSTPVPSSSTTSSGSSGPTGGTGVAKHYEQCGGIGFTGPTQCESPYTCTKLNDWYSQCL

SEQ ID NO: 231 - protein, 509 aa, Myceliophthora thermophila
QNACTLTAENHPSLTWSKCTSGGSCTSVQGSITIDANWRWTHRTDSATNCYTGNKWDTSYCSDGPSCASKCCIDGADYSSTYGITTSGNSLNLKFVTKGQYSTNIGSRTYLMESDTKYQMFQLLGNEFTFDVDVSNLGCGLNGALYFVSMDADGGMSKYSGNKAGAKYGTGYCDSQCPRDLKFINGEANVENWQSSTNDANAGTGKYGSCCSEMDVWEANNMAAAFTPHPCTVIGQSRCEGDSCGGTYSTDRYAGICDPDGCDFNSYRQGNKTFYGKGMTVDTTKKITVVTQFLKNSAGELSEIKRFYVQNGKVIPNSESTIPGVEGNSITQDWCDRQKAAFGDVTDFQDKGGMVQMGKALAGPMVLVMSIWDDHAVNMLWLDSTWPIDGAGKPGAERGACPTTSGVPAEVEAEAPNSNVIFSNIRFGPIGSTVSGLPDGGSGNPNPPVSSSTPVPSSSTTSSGSSGPTGGTGVAKHYEQCGGIGFTGPTQCESPYTCTKLNDWYSQCL

SEQ ID NO: 232 - protein, 509 aa, Myceliophthora thermophila
QNACTLTAENHPSLTWSKCTSGGSCTSVQGSITIDANWRWTHRTDSATNCYWGNKWDTSYCSDGPSCASKCCIDGADYSSTYGITTSGNSLNLKFVTKGQYSTNIGSRTYLMESDTKYQMFQLLGNEFTFDVDVSNLGCGLNGALYFVSMDADGGMSKYSGNKAGAKYGTGYCDSQCPRDLKFINGEANVENWQSSTNDANAGTGKYGSCCSEMDVWEANNMAAAFTPHPCTVIGQSRCEGDSCGGTYSTDRYAGICDPDGCDFNSYRQGNKTFYGKGMTVDTTKKITVVTQFLKNSAGELSEIKRFYVQNGKVIPNSESTIPGVEGNSITQDWCDRQKAAFGDVTDFQDKGGMVQMGKALAGPMVLVMSIWDDHAVNMLWLDSTWPIDGAGKPGAERGACPTTSGVPAEVEAEAPNSNVIFSNIRFGPIGSTVSGLPDGGSGNPNPPVSSSTPVPSSSTTSSGSSGPTGGTGVAKHYEQCGGIGFTGPTQCESPYTCTKLNDWYSQCL

SEQ ID NO: 233 - protein, 509 aa, Myceliophthora thermophila
QNACTLTAENHPSLTWSKCTSGGSCTSVQGSITIDANWRWTHRTDSATNCYEANKWDTSYCSDGPSCASKCCIDGADYSSTYGITTSGNSLNLKFVTKGQYSTNIGSRTYLMESDTKYQMFQLLGNEFTFDVDVSNLGCGLNGALYFVSMDADGGMSKYSGNKAGAKYGTGYCDSQCPRDLKFINGEANVENWQSSTNDANAGTGKYGSCCSEMDVWEANNMAAAFTPHPCTVIGQSRCEGDSCGGTYSTDRYAGICDPDGCDFNSYRQGNKTFYGKGMTVDTTKKITVVTQFLKNSAGELSEIKRFYVQNGKVIPNSESTIPGVEGNSITQDWCDRQKAAFGDVTDFQDKGGMVQMGKALAGPMVLVMSIWDDHAVNMLWLDSTWPIDGAGKPGAERGACPTTSGVPAEVEAEAPNSNVIFSNIRFGPIGSTVSGLPDGGSGNPNPPVSSSTPVPSSSTTSSGSSGPTGGTGVAKHYEQCGGIGFTGPTQCESPYTCTKLNDWYSQCL

SEQ ID NO: 234 - protein, 509 aa, Myceliophthora thermophila
QNACTLTAENHPSLTWSKCTSGGSCTSVQGSITIDANWRWTHRTDSATNCYEMNKWDTSYCSDGPSCASKCCIDGADYSSTYGITTSGNSLNLKFVTKGQYSTNIGSRTYLMESDTKYQMFQLLGNEFTFDVDVSNLGCGLNGALYFVSMDADGGMSKYSGNKAGAKYGTGYCDSQCPRDLKFINGEANVENWQSSTNDANAGTGKYGSCCSEMDVWEANNMAAAFTPHPCTVIGQSRCEGDSCGGTYSTDRYAGICDPDGCDFNSYRQGNKTFYGKGMTVDTTKKITVVTQFLKNSAGELSEIKRFYVQNGKVIPNSESTIPGVEGNSITQDWCDRQKAAFGDVTDFQDKGGMVQMGKALAGPMVLVMSIWDDHAVNMLWLDSTWPIDGAGKPGAERGACPTTSGVPAEVEAEAPNSNVIFSNIRFGPIGSTVSGLPDGGSGNPNPPVSSSTPVPSSSTTSSGSSGPTGGTGVAKHYEQCGGIGFTGPTQCESPYTCTKLNDWYSQCL

SEQ ID NO: 235 - protein, 509 aa, Myceliophthora thermophila
QNACTLTAENHPSLTWSKCTSGGSCTSVQGSITIDANWRWTHRTDSATNCYERNKWDTSYCSDGPSCASKCCIDGADYSSTYGITTSGNSLNLKFVTKGQYSTNIGSRTYLMESDTKYQMFQLLGNEFTFDVDVSNLGCGLNGALYFVSMDADGGMSKYSGNKAGAKYGTGYCDSQCPRDLKFINGEANVENWQSSTNDANAGTGKYGSCCSEMDVWEANNMAAAFTPHPCTVIGQSRCEGDSCGGTYSTDRYAGICDPDGCDFNSYRQGNKTFYGKGMTVDTTKKITVVTQFLKNSAGELSEIKRFYVQNGKVIPNSESTIPGVEGNSITQDWCDRQKAAFGDVTDFQDKGGMVQMGKALAGPMVLVMSIWDDHAVNMLWLDSTWPIDGAGKPGAERGACPTTSGVPAEVEAEAPNSNVIFSNIRFGPIGSTVSGLPDGGSGNPNPPVSSSTPVPSSSTTSSGSSGPTGGTGVAKHYEQCGGIGFTGPTQCESPYTCTKLNDWYSQCL

SEQ ID NO: 236 - protein, 509 aa, Myceliophthora thermophila
QNACTLTAENHPSLTWSKCTSGGSCTSVQGSITIDANWRWTHRTDSATNCYEWNKWDTSYCSDGPSCASKCCIDGADYSSTYGITTSGNSLNLKFVTKGQYSTNIGSRTYLMESDTKYQMFQLLGNEFTFDVDVSNLGCGLNGALYFVSMDADGGMSKYSGNKAGAKYGTGYCDSQCPRDLKFINGEANVENWQSSTNDANAGTGKYGSCCSEMDVWEANNMAAAFTPHPCTVIGQSRCEGDSCGGTYSTDRYAGICDPDGCDFNSYRQGNKTFYGKGMTVDTTKKITVVTQFLKNSAGELSEIKRFYVQNGKVIPNSESTIPGVEGNSITQDWCDRQKAAFGDVTDFQDKGGMVQMGKALAGPMVLVMSIWDDHAVNMLWLDSTWPIDGAGKPGAERGACPTTSGVPAEVEAEAPNSNVIFSNIRFGPIGSTVSGLPDGGSGNPNPPVSSSTPVPSSSTTSSGSSGPTGGTGVAKHYEQCGGIGFTGPTQCESPYTCTKLNDWYSQCL

SEQ ID NO: 237 - protein, 509 aa, Myceliophthora thermophila
QNACTLTAENHPSLTWSKCTSGGSCTSVQGSITIDANWRWTHRTDSATNCYEGDKWDTSYCSDGPSCASKCCIDGADYSSTYGITTSGNSLNLKFVTKGQYSTNIGSRTYLMESDTKYQMFQLLGNEFTFDVDVSNLGCGLNGALYFVSMDADGGMSKYSGNKAGAKYGTGYCDSQCPRDLKFINGEANVENWQSSTNDANAGTGKYGSCCSEMDVWEANNMAAAFTPHPCTVIGQSRCEGDSCGGTYSTDRYAGICDPDGCDFNSYRQGNKTFYGKGMTVDTTKKITVVTQFLKNSAGELSEIKRFYVQNGKVIPNSESTIPGVEGNSITQDWCDRQKAAFGDVTDFQDKGGMVQMGKALAGPMVLVMSIWDDHAVNMLWLDSTWPIDGAGKPGAERGACPTTSGVPAEVEAEAPNSNVIFSNIRFGPIGSTVSGLPDGGSGNPNPPVSSSTPVPSSSTTSSGSSGPTGGTGVAKHYEQCGGIGFTGPTQCESPYTCTKLNDWYSQCL

SEQ ID NO: 238 - protein, 509 aa, Myceliophthora thermophila
QNACTLTAENHPSLTWSKCTSGGSCTSVQGSITIDANWRWTHRTDSATNCYEGIKWDTSYCSDGPSCASKCCIDGADYSSTYGITTSGNSLNLKFVTKGQYSTNIGSRTYLMESDTKYQMFQLLGNEFTFDVDVSNLGCGLNGALYFVSMDADGGMSKYSGNKAGAKYGTGYCDSQCPRDLKFINGEANVENWQSSTNDANAGTGKYGSCCSEMDVWEANNMAAAFTPHPCTVIGQSRCEGDSCGGTYSTDRYAGICDPDGCDFNSYRQGNKTFYGKGMTVDTTKKITVVTQFLKNSAGELSEIKRFYVQNGKVIPNSESTIPGVEGNSITQDWCDRQKAAFGDVTDFQDKGGMVQMGKALAGPMVLVMSIWDDHAVNMLWLDSTWPIDGAGKPGAERGACPTTSGVPAEVEAEAPNSNVIFSNIRFGPIGSTVSGLPDGGSGNPNPPVSSSTPVPSSSTTSSGSSGPTGGTGVAKHYEQCGGIGFTGPTQCESPYTCTKLNDWYSQCL

SEQ ID NO: 239 - protein, 509 aa, Myceliophthora thermophila
QNACTLTAENHPSLTWSKCTSGGSCTSVQGSITIDANWRWTHRTDSATNCYEGSKWDTSYCSDGPSCASKCCIDGADYSSTYGITTSGNSLNLKFVTKGQYSTNIGSRTYLMESDTKYQMFQLLGNEFTFDVDVSNLGCGLNGALYFVSMDADGGMSKYSGNKAGAKYGTGYCDSQCPRDLKFINGEANVENWQSSTNDANAGTGKYGSCCSEMDVWEANNMAAAFTPHPCTVIGQSRCEGDSCGGTYSTDRYAGICDPDGCDFNSYRQGNKTFYGKGMTVDTTKKITVVTQFLKNSAGELSEIKRFYVQNGKVIPNSESTIPGVEGNSITQDWCDRQKAAFGDVTDFQDKGGMVQMGKALAGPMVLVMSIWDDHAVNMLWLDSTWPIDGAGKPGAERGACPTTSGVPAEVEAEAPNSNVIFSNIRFGPIGSTVSGLPDGGSGNPNPPVSSSTPVPSSSTTSSGSSGPTGGTGVAKHYEQCGGIGFTGPTQCESPYTCTKLNDWYSQCL

SEQ ID NO: 240 - protein, 509 aa, Myceliophthora thermophila
QNACTLTAENHPSLTWSKCTSGGSCTSVQGSITIDANWRWTHRTDSATNCYEGNKWDTAYCSDGPSCASKCCIDGADYSSTYGITTSGNSLNLKFVTKGQYSTNIGSRTYLMESDTKYQMFQLLGNEFTFDVDVSNLGCGLNGALYFVSMDADGGMSKYSGNKAGAKYGTGYCDSQCPRDLKFINGEANVENWQSSTNDANAGTGKYGSCCSEMDVWEANNMAAAFTPHPCTVIGQSRCEGDSCGGTYSTDRYAGICDPDGCDFNSYRQGNKTFYGKGMTVDTTKKITVVTQFLKNSAGELSEIKRFYVQNGKVIPNSESTIPGVEGNSITQDWCDRQKAAFGDVTDFQDKGGMVQMGKALAGPMVLVMSIWDDHAVNMLWLDSTWPIDGAGKPGAERGACPTTSGVPAEVEAEAPNSNVIFSNIRFGPIGSTVSGLPDGGSGNPNPPVSSSTPVPSSSTTSSGSSGPTGGTGVAKHYEQCGGIGFTGPTQCESPYTCTKLNDWYSQCL

SEQ ID NO: 241 - protein, 509 aa, Myceliophthora thermophila
QNACTLTAENHPSLTWSKCTSGGSCTSVQGSITIDANWRWTHRTDSATNCYEGNKWDTSYCSDGPSCASKCCIDSADYSSTYGITTSGNSLNLKFVTKGQYSTNIGSRTYLMESDTKYQMFQLLGNEFTFDVDVSNLGCGLNGALYFVSMDADGGMSKYSGNKAGAKYGTGYCDSQCPRDLKFINGEANVENWQSSTNDANAGTGKYGSCCSEMDVWEANNMAAAFTPHPCTVIGQSRCEGDSCGGTYSTDRYAGICDPDGCDFNSYRQGNKTFYGKGMTVDTTKKITVVTQFLKNSAGELSEIKRFYVQNGKVIPNSESTIPGVEGNSITQDWCDRQKAAFGDVTDFQDKGGMVQMGKALAGPMVLVMSIWDDHAVNMLWLDSTWPIDGAGKPGAERGACPTTSGVPAEVEAEAPNSNVIFSNIRFGPIGSTVSGLPDGGSGNPNPPVSSSTPVPSSSTTSSGSSGPTGGTGVAKHYEQCGGIGFTGPTQCESPYTCTKLNDWYSQCL

SEQ ID NO: 242 - protein, 509 aa, Myceliophthora thermophila
QNACTLTAENHPSLTWSKCTSGGSCTSVQGSITIDANWRWTHRTDSATNCYEGNKWDTSYCSDGPSCASKCCIDGADYSSTYGITTTGNSLNLKFVTKGQYSTNIGSRTYLMESDTKYQMFQLLGNEFTFDVDVSNLGCGLNGALYFVSMDADGGMSKYSGNKAGAKYGTGYCDSQCPRDLKFINGEANVENWQSSTNDANAGTGKYGSCCSEMDVWEANNMAAAFTPHPCTVIGQSRCEGDSCGGTYSTDRYAGICDPDGCDFNSYRQGNKTFYGKGMTVDTTKKITVVTQFLKNSAGELSEIKRFYVQNGKVIPNSESTIPGVEGNSITQDWCDRQKAAFGDVTDFQDKGGMVQMGKALAGPMVLVMSIWDDHAVNMLWLDSTWPIDGAGKPGAERGACPTTSGVPAEVEAEAPNSNVIFSNIRFGPIGSTVSGLPDGGSGNPNPPVSSSTPVPSSSTTSSGSSGPTGGTGVAKHYEQCGGIGFTGPTQCESPYTCTKLNDWYSQCL

SEQ ID NO: 243 - protein, 509 aa, Myceliophthora thermophila
QNACTLTAENHPSLTWSKCTSGGSCTSVQGSITIDANWRWTHRTDSATNCYEGNKWDTSYCSDGPSCASKCCIDGADYSSTYGITTSVNSLNLKFVTKGQYSTNIGSRTYLMESDTKYQMFQLLGNEFTFDVDVSNLGCGLNGALYFVSMDADGGMSKYSGNKAGAKYGTGYCDSQCPRDLKFINGEANVENWQSSTNDANAGTGKYGSCCSEMDVWEANNMAAAFTPHPCTVIGQSRCEGDSCGGTYSTDRYAGICDPDGCDFNSYRQGNKTFYGKGMTVDTTKKITVVTQFLKNSAGELSEIKRFYVQNGKVIPNSESTIPGVEGNSITQDWCDRQKAAFGDVTDFQDKGGMVQMGKALAGPMVLVMSIWDDHAVNMLWLDSTWPIDGAGKPGAERGACPTTSGVPAEVEAEAPNSNVIFSNIRFGPIGSTVSGLPDGGSGNPNPPVSSSTPVPSSSTTSSGSSGPTGGTGVAKHYEQCGGIGFTGPTQCESPYTCTKLNDWYSQCL

SEQ ID NO: 244 - protein, 509 aa, Myceliophthora thermophila
QNACTLTAENHPSLTWSKCTSGGSCTSVQGSITIDANWRWTHRTDSATNCYEGNKWDTSYCSDGPSCASKCCIDGADYSSTYGITTSGNSLNVKFVTKGQYSTNIGSRTYLMESDTKYQMFQLLGNEFTFDVDVSNLGCGLNGALYFVSMDADGGMSKYSGNKAGAKYGTGYCDSQCPRDLKFINGEANVENWQSSTNDANAGTGKYGSCCSEMDVWEANNMAAAFTPHPCTVIGQSRCEGDSCGGTYSTDRYAGICDPDGCDFNSYRQGNKTFYGKGMTVDTTKKITVVTQFLKNSAGELSEIKRFYVQNGKVIPNSESTIPGVEGNSITQDWCDRQKAAFGDVTDFQDKGGMVQMGKALAGPMVLVMSIWDDHAVNMLWLDSTWPIDGAGKPGAERGACPTTSGVPAEVEAEAPNSNVIFSNIRFGPIGSTVSGLPDGGSGNPNPPVSSSTPVPSSSTTSSGSSGPTGGTGVAKHYEQCGGIGFTGPTQCESPYTCTKLNDWYSQCL

SEQ ID NO: 245 - protein, 509 aa, Myceliophthora thermophila
QNACTLTAENHPSLTWSKCTSGGSCTSVQGSITIDANWRWTHRTDSATNCYEGNKWDTSYCSDGPSCASKCCIDGADYSSTYGITTSGNSLNLKLVTKGQYSTNIGSRTYLMESDTKYQMFQLLGNEFTFDVDVSNLGCGLNGALYFVSMDADGGMSKYSGNKAGAKYGTGYCDSQCPRDLKFINGEANVENWQSSTNDANAGTGKYGSCCSEMDVWEANNMAAAFTPHPCTVIGQSRCEGDSCGGTYSTDRYAGICDPDGCDFNSYRQGNKTFYGKGMTVDTTKKITVVTQFLKNSAGELSEIKRFYVQNGKVIPNSESTIPGVEGNSITQDWCDRQKAAFGDVTDFQDKGGMVQMGKALAGPMVLVMSIWDDHAVNMLWLDSTWPIDGAGKPGAERGACPTTSGVPAEVEAEAPNSNVIFSNIRFGPIGSTVSGLPDGGSGNPNPPVSSSTPVPSSSTTSSGSSGPTGGTGVAKHYEQCGGIGFTGPTQCESPYTCTKLNDWYSQCL

SEQ ID NO: 246 - protein, 509 aa, Myceliophthora thermophila
QNACTLTAENHPSLTWSKCTSGGSCTSVQGSITIDANWRWTHRTDSATNCYEGNKWDTSYCSDGPSCASKCCIDGADYSSTYGITTSGNSLNLKYVTKGQYSTNIGSRTYLMESDTKYQMFQLLGNEFTFDVDVSNLGCGLNGALYFVSMDADGGMSKYSGNKAGAKYGTGYCDSQCPRDLKFINGEANVENWQSSTNDANAGTGKYGSCCSEMDVWEANNMAAAFTPHPCTVIGQSRCEGDSCGGTYSTDRYAGICDPDGCDFNSYRQGNKTFYGKGMTVDTTKKITVVTQFLKNSAGELSEIKRFYVQNGKVIPNSESTIPGVEGNSITQDWCDRQKAAFGDVTDFQDKGGMVQMGKALAGPMVLVMSIWDDHAVNMLWLDSTWPIDGAGKPGAERGACPTTSGVPAEVEAEAPNSNVIFSNIRFGPIGSTVSGLPDGGSGNPNPPVSSSTPVPSSSTTSSGSSGPTGGTGVAKHYEQCGGIGFTGPTQCESPYTCTKLNDWYSQCL

SEQ ID NO: 247 - protein, 509 aa, Myceliophthora thermophila
QNACTLTAENHPSLTWSKCTSGGSCTSVQGSITIDANWRWTHRTDSATNCYEGNKWDTSYCSDGPSCASKCCIDGADYSSTYGITTSGNSLNLKFVTKGQGSTNIGSRTYLMESDTKYQMFQLLGNEFTFDVDVSNLGCGLNGALYFVSMDADGGMSKYSGNKAGAKYGTGYCDSQCPRDLKFINGEANVENWQSSTNDANAGTGKYGSCCSEMDVWEANNMAAAFTPHPCTVIGQSRCEGDSCGGTYSTDRYAGICDPDGCDFNSYRQGNKTFYGKGMTVDTTKKITVVTQFLKNSAGELSEIKRFYVQNGKVIPNSESTIPGVEGNSITQDWCDRQKAAFGDVTDFQDKGGMVQMGKALAGPMVLVMSIWDDHAVNMLWLDSTWPIDGAGKPGAERGACPTTSGVPAEVEAEAPNSNVIFSNIRFGPIGSTVSGLPDGGSGNPNPPVSSSTPVPSSSTTSSGSSGPTGGTGVAKHYEQCGGIGFTGPTQCESPYTCTKLNDWYSQCL

SEQ ID NO: 248 - protein, 509 aa, Myceliophthora thermophila
QNACTLTAENHPSLTWSKCTSGGSCTSVQGSITIDANWRWTHRTDSATNCYEGNKWDTSYCSDGPSCASKCCIDGADYSSTYGITTSGNSLNLKFVTKGQLSTNIGSRTYLMESDTKYQMFQLLGNEFTFDVDVSNLGCGLNGALYFVSMDADGGMSKYSGNKAGAKYGTGYCDSQCPRDLKFINGEANVENWQSSTNDANAGTGKYGSCCSEMDVWEANNMAAAFTPHPCTVIGQSRCEGDSCGGTYSTDRYAGICDPDGCDFNSYRQGNKTFYGKGMTVDTTKKITVVTQFLKNSAGELSEIKRFYVQNGKVIPNSESTIPGVEGNSITQDWCDRQKAAFGDVTDFQDKGGMVQMGKALAGPMVLVMSIWDDHAVNMLWLDSTWPIDGAGKPGAERGACPTTSGVPAEVEAEAPNSNVIFSNIRFGPIGSTVSGLPDGGSGNPNPPVSSSTPVPSSSTTSSGSSGPTGGTGVAKHYEQCGGIGFTGPTQCESPYTCTKLNDWYSQCL

SEQ ID NO: 249 - protein, 509 aa, Myceliophthora thermophila
QNACTLTAENHPSLTWSKCTSGGSCTSVQGSITIDANWRWTHRTDSATNCYEGNKWDTSYCSDGPSCASKCCIDGADYSSTYGITTSGNSLNLKFVTKGQTSTNIGSRTYLMESDTKYQMFQLLGNEFTFDVDVSNLGCGLNGALYFVSMDADGGMSKYSGNKAGAKYGTGYCDSQCPRDLKFINGEANVENWQSSTNDANAGTGKYGSCCSEMDVWEANNMAAAFTPHPCTVIGQSRCEGDSCGGTYSTDRYAGICDPDGCDFNSYRQGNKTFYGKGMTVDTTKKITVVTQFLKNSAGELSEIKRFYVQNGKVIPNSESTIPGVEGNSITQDWCDRQKAAFGDVTDFQDKGGMVQMGKALAGPMVLVMSIWDDHAVNMLWLDSTWPIDGAGKPGAERGACPTTSGVPAEVEAEAPNSNVIFSNIRFGPIGSTVSGLPDGGSGNPNPPVSSSTPVPSSSTTSSGSSGPTGGTGVAKHYEQCGGIGFTGPTQCESPYTCTKLNDWYSQCL

SEQ ID NO: 250 - protein, 509 aa, Myceliophthora thermophila
QNACTLTAENHPSLTWSKCTSGGSCTSVQGSITIDANWRWTHRTDSATNCYEGNKWDTSYCSDGPSCASKCCIDGADYSSTYGITTSGNSLNLKFVTKGQVSTNIGSRTYLMESDTKYQMFQLLGNEFTFDVDVSNLGCGLNGALYFVSMDADGGMSKYSGNKAGAKYGTGYCDSQCPRDLKFINGEANVENWQSSTNDANAGTGKYGSCCSEMDVWEANNMAAAFTPHPCTVIGQSRCEGDSCGGTYSTDRYAGICDPDGCDFNSYRQGNKTFYGKGMTVDTTKKITVVTQFLKNSAGELSEIKRFYVQNGKVIPNSESTIPGVEGNSITQDWCDRQKAAFGDVTDFQDKGGMVQMGKALAGPMVLVMSIWDDHAVNMLWLDSTWPIDGAGKPGAERGACPTTSGVPAEVEAEAPNSNVIFSNIRFGPIGSTVSGLPDGGSGNPNPPVSSSTPVPSSSTTSSGSSGPTGGTGVAKHYEQCGGIGFTGPTQCESPYTCTKLNDWYSQCL

SEQ ID NO: 251 - protein, 509 aa, Myceliophthora thermophila
QNACTLTAENHPSLTWSKCTSGGSCTSVQGSITIDANWRWTHRTDSATNCYEGNKWDTSYCSDGPSCASKCCIDGADYSSTYGITTSGNSLNLKFVTKGQWSTNIGSRTYLMESDTKYQMFQLLGNEFTFDVDVSNLGCGLNGALYFVSMDADGGMSKYSGNKAGAKYGTGYCDSQCPRDLKFINGEANVENWQSSTNDANAGTGKYGSCCSEMDVWEANNMAAAFTPHPCTVIGQSRCEGDSCGGTYSTDRYAGICDPDGCDFNSYRQGNKTFYGKGMTVDTTKKITVVTQFLKNSAGELSEIKRFYVQNGKVIPNSESTIPGVEGNSITQDWCDRQKAAFGDVTDFQDKGGMVQMGKALAGPMVLVMSIWDDHAVNMLWLDSTWPIDGAGKPGAERGACPTTSGVPAEVEAEAPNSNVIFSNIRFGPIGSTVSGLPDGGSGNPNPPVSSSTPVPSSSTTSSGSSGPTGGTGVAKHYEQCGGIGFTGPTQCESPYTCTKLNDWYSQCL

SEQ ID NO: 252 - protein, 509 aa, Myceliophthora thermophila
QNACTLTAENHPSLTWSKCTSGGSCTSVQGSITIDANWRWTHRTDSATNCYEGNKWDTSYCSDGPSCASKCCIDGADYSSTYGITTSGNSLNLKFVTKGQYSRNIGSRTYLMESDTKYQMFQLLGNEFTFDVDVSNLGCGLNGALYFVSMDADGGMSKYSGNKAGAKYGTGYCDSQCPRDLKFINGEANVENWQSSTNDANAGTGKYGSCCSEMDVWEANNMAAAFTPHPCTVIGQSRCEGDSCGGTYSTDRYAGICDPDGCDFNSYRQGNKTFYGKGMTVDTTKKITVVTQFLKNSAGELSEIKRFYVQNGKVIPNSESTIPGVEGNSITQDWCDRQKAAFGDVTDFQDKGGMVQMGKALAGPMVLVMSIWDDHAVNMLWLDSTWPIDGAGKPGAERGACPTTSGVPAEVEAEAPNSNVIFSNIRFGPIGSTVSGLPDGGSGNPNPPVSSSTPVPSSSTTSSGSSGPTGGTGVAKHYEQCGGIGFTGPTQCESPYTCTKLNDWYSQCL

SEQ ID NO: 253 - protein, 509 aa, Myceliophthora thermophila
QNACTLTAENHPSLTWSKCTSGGSCTSVQGSITIDANWRWTHRTDSATNCYEGNKWDTSYCSDGPSCASKCCIDGADYSSTYGITTSGNSLNLKFVTKGQYSSNIGSRTYLMESDTKYQMFQLLGNEFTFDVDVSNLGCGLNGALYFVSMDADGGMSKYSGNKAGAKYGTGYCDSQCPRDLKFINGEANVENWQSSTNDANAGTGKYGSCCSEMDVWEANNMAAAFTPHPCTVIGQSRCEGDSCGGTYSTDRYAGICDPDGCDFNSYRQGNKTFYGKGMTVDTTKKITVVTQFLKNSAGELSEIKRFYVQNGKVIPNSESTIPGVEGNSITQDWCDRQKAAFGDVTDFQDKGGMVQMGKALAGPMVLVMSIWDDHAVNMLWLDSTWPIDGAGKPGAERGACPTTSGVPAEVEAEAPNSNVIFSNIRFGPIGSTVSGLPDGGSGNPNPPVSSSTPVPSSSTTSSGSSGPTGGTGVAKHYEQCGGIGFTGPTQCESPYTCTKLNDWYSQCL

SEQ ID NO: 254 - protein, 509 aa, Myceliophthora thermophila
QNACTLTAENHPSLTWSKCTSGGSCTSVQGSITIDANWRWTHRTDSATNCYEGNKWDTSYCSDGPSCASKCCIDGADYSSTYGITTSGNSLNLKFVTKGQYSTNIGSRIYLMESDTKYQMFQLLGNEFTFDVDVSNLGCGLNGALYFVSMDADGGMSKYSGNKAGAKYGTGYCDSQCPRDLKFINGEANVENWQSSTNDANAGTGKYGSCCSEMDVWEANNMAAAFTPHPCTVIGQSRCEGDSCGGTYSTDRYAGICDPDGCDFNSYRQGNKTFYGKGMTVDTTKKITVVTQFLKNSAGELSEIKRFYVQNGKVIPNSESTIPGVEGNSITQDWCDRQKAAFGDVTDFQDKGGMVQMGKALAGPMVLVMSIWDDHAVNMLWLDSTWPIDGAGKPGAERGACPTTSGVPAEVEAEAPNSNVIFSNIRFGPIGSTVSGLPDGGSGNPNPPVSSSTPVPSSSTTSSGSSGPTGGTGVAKHYEQCGGIGFTGPTQCESPYTCTKLNDWYSQCL

SEQ ID NO: 255 - protein, 509 aa, Myceliophthora thermophila
QNACTLTAENHPSLTWSKCTSGGSCTSVQGSITIDANWRWTHRTDSATNCYEGNKWDTSYCSDGPSCASKCCIDGADYSSTYGITTSGNSLNLKFVTKGQYSTNIGSRTYLTESDTKYQMFQLLGNEFTFDVDVSNLGCGLNGALYFVSMDADGGMSKYSGNKAGAKYGTGYCDSQCPRDLKFINGEANVENWQSSTNDANAGTGKYGSCCSEMDVWEANNMAAAFTPHPCTVIGQSRCEGDSCGGTYSTDRYAGICDPDGCDFNSYRQGNKTFYGKGMTVDTTKKITVVTQFLKNSAGELSEIKRFYVQNGKVIPNSESTIPGVEGNSITQDWCDRQKAAFGDVTDFQDKGGMVQMGKALAGPMVLVMSIWDDHAVNMLWLDSTWPIDGAGKPGAERGACPTTSGVPAEVEAEAPNSNVIFSNIRFGPIGSTVSGLPDGGSGNPNPPVSSSTPVPSSSTTSSGSSGPTGGTGVAKHYEQCGGIGFTGPTQCESPYTCTKLNDWYSQCL

SEQ ID NO: 256 - protein, 509 aa, Myceliophthora thermophila
QNACTLTAENHPSLTWSKCTSGGSCTSVQGSITIDANWRWTHRTDSATNCYEGNKWDTSYCSDGPSCASKCCIDGADYSSTYGITTSGNSLNLKFVTKGQYSTNIGSRTYLMESETKYQMFQLLGNEFTFDVDVSNLGCGLNGALYFVSMDADGGMSKYSGNKAGAKYGTGYCDSQCPRDLKFINGEANVENWQSSTNDANAGTGKYGSCCSEMDVWEANNMAAAFTPHPCTVIGQSRCEGDSCGGTYSTDRYAGICDPDGCDFNSYRQGNKTFYGKGMTVDTTKKITVVTQFLKNSAGELSEIKRFYVQNGKVIPNSESTIPGVEGNSITQDWCDRQKAAFGDVTDFQDKGGMVQMGKALAGPMVLVMSIWDDHAVNMLWLDSTWPIDGAGKPGAERGACPTTSGVPAEVEAEAPNSNVIFSNIRFGPIGSTVSGLPDGGSGNPNPPVSSSTPVPSSSTTSSGSSGPTGGTGVAKHYEQCGGIGFTGPTQCESPYTCTKLNDWYSQCL

SEQ ID NO: 257 - protein, 509 aa, Myceliophthora thermophila
QNACTLTAENHPSLTWSKCTSGGSCTSVQGSITIDANWRWTHRTDSATNCYEGNKWDTSYCSDGPSCASKCCIDGADYSSTYGITTSGNSLNLKFVTKGQYSTNIGSRTYLMESDTKYQMFQLLGNEFTSDVDVSNLGCGLNGALYFVSMDADGGMSKYSGNKAGAKYGTGYCDSQCPRDLKFINGEANVENWQSSTNDANAGTGKYGSCCSEMDVWEANNMAAAFTPHPCTVIGQSRCEGDSCGGTYSTDRYAGICDPDGCDFNSYRQGNKTFYGKGMTVDTTKKITVVTQFLKNSAGELSEIKRFYVQNGKVIPNSESTIPGVEGNSITQDWCDRQKAAFGDVTDFQDKGGMVQMGKALAGPMVLVMSIWDDHAVNMLWLDSTWPIDGAGKPGAERGACPTTSGVPAEVEAEAPNSNVIFSNIRFGPIGSTVSGLPDGGSGNPNPPVSSSTPVPSSSTTSSGSSGPTGGTGVAKHYEQCGGIGFTGPTQCESPYTCTKLNDWYSQCL

SEQ ID NO: 258 - protein, 509 aa, Myceliophthora thermophila
QNACTLTAENHPSLTWSKCTSGGSCTSVQGSITIDANWRWTHRTDSATNCYEGNKWDTSYCSDGPSCASKCCIDGADYSSTYGITTSGNSLNLKFVTKGQYSTNIGSRTYLMESDTKYQMFQLLGNEFTFEVDVSNLGCGLNGALYFVSMDADGGMSKYSGNKAGAKYGTGYCDSQCPRDLKFINGEANVENWQSSTNDANAGTGKYGSCCSEMDVWEANNMAAAFTPHPCTVIGQSRCEGDSCGGTYSTDRYAGICDPDGCDFNSYRQGNKTFYGKGMTVDTTKKITVVTQFLKNSAGELSEIKRFYVQNGKVIPNSESTIPGVEGNSITQDWCDRQKAAFGDVTDFQDKGGMVQMGKALAGPMVLVMSIWDDHAVNMLWLDSTWPIDGAGKPGAERGACPTTSGVPAEVEAEAPNSNVIFSNIRFGPIGSTVSGLPDGGSGNPNPPVSSSTPVPSSSTTSSGSSGPTGGTGVAKHYEQCGGIGFTGPTQCESPYTCTKLNDWYSQCL

SEQ ID NO: 259 - protein, 509 aa, Myceliophthora thermophila
QNACTLTAENHPSLTWSKCTSGGSCTSVQGSITIDANWRWTHRTDSATNCYEGNKWDTSYCSDGPSCASKCCIDGADYSSTYGITTSGNSLNLKFVTKGQYSTNIGSRTYLMESDTKYQMFQLLGNEFTFNVDVSNLGCGLNGALYFVSMDADGGMSKYSGNKAGAKYGTGYCDSQCPRDLKFINGEANVENWQSSTNDANAGTGKYGSCCSEMDVWEANNMAAAFTPHPCTVIGQSRCEGDSCGGTYSTDRYAGICDPDGCDFNSYRQGNKTFYGKGMTVDTTKKITVVTQFLKNSAGELSEIKRFYVQNGKVIPNSESTIPGVEGNSITQDWCDRQKAAFGDVTDFQDKGGMVQMGKALAGPMVLVMSIWDDHAVNMLWLDSTWPIDGAGKPGAERGACPTTSGVPAEVEAEAPNSNVIFSNIRFGPIGSTVSGLPDGGSGNPNPPVSSSTPVPSSSTTSSGSSGPTGGTGVAKHYEQCGGIGFTGPTQCESPYTCTKLNDWYSQCL

SEQ ID NO: 260 - protein, 509 aa, Myceliophthora thermophila
QNACTLTAENHPSLTWSKCTSGGSCTSVQGSITIDANWRWTHRTDSATNCYEGNKWDTSYCSDGPSCASKCCIDGADYSSTYGITTSGNSLNLKFVTKGQYSTNIGSRTYLMESDTKYQMFQLLGNEFTFDADVSNLGCGLNGALYFVSMDADGGMSKYSGNKAGAKYGTGYCDSQCPRDLKFINGEANVENWQSSTNDANAGTGKYGSCCSEMDVWEANNMAAAFTPHPCTVIGQSRCEGDSCGGTYSTDRYAGICDPDGCDFNSYRQGNKTFYGKGMTVDTTKKITVVTQFLKNSAGELSEIKRFYVQNGKVIPNSESTIPGVEGNSITQDWCDRQKAAFGDVTDFQDKGGMVQMGKALAGPMVLVMSIWDDHAVNMLWLDSTWPIDGAGKPGAERGACPTTSGVPAEVEAEAPNSNVIFSNIRFGPIGSTVSGLPDGGSGNPNPPVSSSTPVPSSSTTSSGSSGPTGGTGVAKHYEQCGGIGFTGPTQCESPYTCTKLNDWYSQCL

SEQ ID NO: 261 - protein, 509 aa, Myceliophthora thermophila
QNACTLTAENHPSLTWSKCTSGGSCTSVQGSITIDANWRWTHRTDSATNCYEGNKWDTSYCSDGPSCASKCCIDGADYSSTYGITTSGNSLNLKFVTKGQYSTNIGSRTYLMESDTKYQMFQLLGNEFTFDVDVSNLSCGLNGALYFVSMDADGGMSKYSGNKAGAKYGTGYCDSQCPRDLKFINGEANVENWQSSTNDANAGTGKYGSCCSEMDVWEANNMAAAFTPHPCTVIGQSRCEGDSCGGTYSTDRYAGICDPDGCDFNSYRQGNKTFYGKGMTVDTTKKITVVTQFLKNSAGELSEIKRFYVQNGKVIPNSESTIPGVEGNSITQDWCDRQKAAFGDVTDFQDKGGMVQMGKALAGPMVLVMSIWDDHAVNMLWLDSTWPIDGAGKPGAERGACPTTSGVPAEVEAEAPNSNVIFSNIRFGPIGSTVSGLPDGGSGNPNPPVSSSTPVPSSSTTSSGSSGPTGGTGVAKHYEQCGGIGFTGPTQCESPYTCTKLNDWYSQCL

SEQ ID NO: 262 - protein, 509 aa, Myceliophthora thermophila
QNACTLTAENHPSLTWSKCTSGGSCTSVQGSITIDANWRWTHRTDSATNCYEGNKWDTSYCSDGPSCASKCCIDGADYSSTYGITTSGNSLNLKFVTKGQYSTNIGSRTYLMESDTKYQMFQLLGNEFTFDVDVSNLGSGLNGALYFVSMDADGGMSKYSGNKAGAKYGTGYCDSQCPRDLKFINGEANVENWQSSTNDANAGTGKYGSCCSEMDVWEANNMAAAFTPHPCTVIGQSRCEGDSCGGTYSTDRYAGICDPDGCDFNSYRQGNKTFYGKGMTVDTTKKITVVTQFLKNSAGELSEIKRFYVQNGKVIPNSESTIPGVEGNSITQDWCDRQKAAFGDVTDFQDKGGMVQMGKALAGPMVLVMSIWDDHAVNMLWLDSTWPIDGAGKPGAERGACPTTSGVPAEVEAEAPNSNVIFSNIRFGPIGSTVSGLPDGGSGNPNPPVSSSTPVPSSSTTSSGSSGPTGGTGVAKHYEQCGGIGFTGPTQCESPYTCTKLNDWYSQCL

SEQ ID NO: 263 - protein, 509 aa, Myceliophthora thermophila
QNACTLTAENHPSLTWSKCTSGGSCTSVQGSITIDANWRWTHRTDSATNCYEGNKWDTSYCSDGPSCASKCCIDGADYSSTYGITTSGNSLNLKFVTKGQYSTNIGSRTYLMESDTKYQMFQLLGNEFTFDVDVSNLGCELNGALYFVSMDADGGMSKYSGNKAGAKYGTGYCDSQCPRDLKFINGEANVENWQSSTNDANAGTGKYGSCCSEMDVWEANNMAAAFTPHPCTVIGQSRCEGDSCGGTYSTDRYAGICDPDGCDFNSYRQGNKTFYGKGMTVDTTKKITVVTQFLKNSAGELSEIKRFYVQNGKVIPNSESTIPGVEGNSITQDWCDRQKAAFGDVTDFQDKGGMVQMGKALAGPMVLVMSIWDDHAVNMLWLDSTWPIDGAGKPGAERGACPTTSGVPAEVEAEAPNSNVIFSNIRFGPIGSTVSGLPDGGSGNPNPPVSSSTPVPSSSTTSSGSSGPTGGTGVAKHYEQCGGIGFTGPTQCESPYTCTKLNDWYSQCL

SEQ ID NO: 264 - protein, 509 aa, Myceliophthora thermophila
QNACTLTAENHPSLTWSKCTSGGSCTSVQGSITIDANWRWTHRTDSATNCYEGNKWDTSYCSDGPSCASKCCIDGADYSSTYGITTSGNSLNLKFVTKGQYSTNIGSRTYLMESDTKYQMFQLLGNEFTFDVDVSNLGCMLNGALYFVSMDADGGMSKYSGNKAGAKYGTGYCDSQCPRDLKFINGEANVENWQSSTNDANAGTGKYGSCCSEMDVWEANNMAAAFTPHPCTVIGQSRCEGDSCGGTYSTDRYAGICDPDGCDFNSYRQGNKTFYGKGMTVDTTKKITVVTQFLKNSAGELSEIKRFYVQNGKVIPNSESTIPGVEGNSITQDWCDRQKAAFGDVTDFQDKGGMVQMGKALAGPMVLVMSIWDDHAVNMLWLDSTWPIDGAGKPGAERGACPTTSGVPAEVEAEAPNSNVIFSNIRFGPIGSTVSGLPDGGSGNPNPPVSSSTPVPSSSTTSSGSSGPTGGTGVAKHYEQCGGIGFTGPTQCESPYTCTKLNDWYSQCL

SEQ ID NO: 265 - protein, 509 aa, Myceliophthora thermophila
QNACTLTAENHPSLTWSKCTSGGSCTSVQGSITIDANWRWTHRTDSATNCYEGNKWDTSYCSDGPSCASKCCIDGADYSSTYGITTSGNSLNLKFVTKGQYSTNIGSRTYLMESDTKYQMFQLLGNEFTFDVDVSNLGCQLNGALYFVSMDADGGMSKYSGNKAGAKYGTGYCDSQCPRDLKFINGEANVENWQSSTNDANAGTGKYGSCCSEMDVWEANNMAAAFTPHPCTVIGQSRCEGDSCGGTYSTDRYAGICDPDGCDFNSYRQGNKTFYGKGMTVDTTKKITVVTQFLKNSAGELSEIKRFYVQNGKVIPNSESTIPGVEGNSITQDWCDRQKAAFGDVTDFQDKGGMVQMGKALAGPMVLVMSIWDDHAVNMLWLDSTWPIDGAGKPGAERGACPTTSGVPAEVEAEAPNSNVIFSNIRFGPIGSTVSGLPDGGSGNPNPPVSSSTPVPSSSTTSSGSSGPTGGTGVAKHYEQCGGIGFTGPTQCESPYTCTKLNDWYSQCL

SEQ ID NO: 266 - protein, 509 aa, Myceliophthora thermophila
QNACTLTAENHPSLTWSKCTSGGSCTSVQGSITIDANWRWTHRTDSATNCYEGNKWDTSYCSDGPSCASKCCIDGADYSSTYGITTSGNSLNLKFVTKGQYSTNIGSRTYLMESDTKYQMFQLLGNEFTFDVDVSNLGCRLNGALYFVSMDADGGMSKYSGNKAGAKYGTGYCDSQCPRDLKFINGEANVENWQSSTNDANAGTGKYGSCCSEMDVWEANNMAAAFTPHPCTVIGQSRCEGDSCGGTYSTDRYAGICDPDGCDFNSYRQGNKTFYGKGMTVDTTKKITVVTQFLKNSAGELSEIKRFYVQNGKVIPNSESTIPGVEGNSITQDWCDRQKAAFGDVTDFQDKGGMVQMGKALAGPMVLVMSIWDDHAVNMLWLDSTWPIDGAGKPGAERGACPTTSGVPAEVEAEAPNSNVIFSNIRFGPIGSTVSGLPDGGSGNPNPPVSSSTPVPSSSTTSSGSSGPTGGTGVAKHYEQCGGIGFTGPTQCESPYTCTKLNDWYSQCL

SEQ ID NO: 267 - protein, 509 aa, Myceliophthora thermophila
QNACTLTAENHPSLTWSKCTSGGSCTSVQGSITIDANWRWTHRTDSATNCYEGNKWDTSYCSDGPSCASKCCIDGADYSSTYGITTSGNSLNLKFVTKGQYSTNIGSRTYLMESDTKYQMFQLLGNEFTFDVDVSNLGCSLNGALYFVSMDADGGMSKYSGNKAGAKYGTGYCDSQCPRDLKFINGEANVENWQSSTNDANAGTGKYGSCCSEMDVWEANNMAAAFTPHPCTVIGQSRCEGDSCGGTYSTDRYAGICDPDGCDFNSYRQGNKTFYGKGMTVDTTKKITVVTQFLKNSAGELSEIKRFYVQNGKVIPNSESTIPGVEGNSITQDWCDRQKAAFGDVTDFQDKGGMVQMGKALAGPMVLVMSIWDDHAVNMLWLDSTWPIDGAGKPGAERGACPTTSGVPAEVEAEAPNSNVIFSNIRFGPIGSTVSGLPDGGSGNPNPPVSSSTPVPSSSTTSSGSSGPTGGTGVAKHYEQCGGIGFTGPTQCESPYTCTKLNDWYSQCL

SEQ ID NO: 268 - protein, 509 aa, Myceliophthora thermophila
QNACTLTAENHPSLTWSKCTSGGSCTSVQGSITIDANWRWTHRTDSATNCYEGNKWDTSYCSDGPSCASKCCIDGADYSSTYGITTSGNSLNLKFVTKGQYSTNIGSRTYLMESDTKYQMFQLLGNEFTFDVDVSNLGCGLNGGLYFVSMDADGGMSKYSGNKAGAKYGTGYCDSQCPRDLKFINGEANVENWQSSTNDANAGTGKYGSCCSEMDVWEANNMAAAFTPHPCTVIGQSRCEGDSCGGTYSTDRYAGICDPDGCDFNSYRQGNKTFYGKGMTVDTTKKITVVTQFLKNSAGELSEIKRFYVQNGKVIPNSESTIPGVEGNSITQDWCDRQKAAFGDVTDFQDKGGMVQMGKALAGPMVLVMSIWDDHAVNMLWLDSTWPIDGAGKPGAERGACPTTSGVPAEVEAEAPNSNVIFSNIRFGPIGSTVSGLPDGGSGNPNPPVSSSTPVPSSSTTSSGSSGPTGGTGVAKHYEQCGGIGFTGPTQCESPYTCTKLNDWYSQCL

SEQ ID NO: 269 - protein, 509 aa, Myceliophthora thermophila
QNACTLTAENHPSLTWSKCTSGGSCTSVQGSITIDANWRWTHRTDSATNCYEGNKWDTSYCSDGPSCASKCCIDGADYSSTYGITTSGNSLNLKFVTKGQYSTNIGSRTYLMESDTKYQMFQLLGNEFTFDVDVSNLGCGLNGLLYFVSMDADGGMSKYSGNKAGAKYGTGYCDSQCPRDLKFINGEANVENWQSSTNDANAGTGKYGSCCSEMDVWEANNMAAAFTPHPCTVIGQSRCEGDSCGGTYSTDRYAGICDPDGCDFNSYRQGNKTFYGKGMTVDTTKKITVVTQFLKNSAGELSEIKRFYVQNGKVIPNSESTIPGVEGNSITQDWCDRQKAAFGDVTDFQDKGGMVQMGKALAGPMVLVMSIWDDHAVNMLWLDSTWPIDGAGKPGAERGACPTTSGVPAEVEAEAPNSNVIFSNIRFGPIGSTVSGLPDGGSGNPNPPVSSSTPVPSSSTTSSGSSGPTGGTGVAKHYEQCGGIGFTGPTQCESPYTCTKLNDWYSQCL

SEQ ID NO: 270 - protein, 509 aa, Myceliophthora thermophila
QNACTLTAENHPSLTWSKCTSGGSCTSVQGSITIDANWRWTHRTDSATNCYEGNKWDTSYCSDGPSCASKCCIDGADYSSTYGITTSGNSLNLKFVTKGQYSTNIGSRTYLMESDTKYQMFQLLGNEFTFDVDVSNLGCGLNGAAYFVSMDADGGMSKYSGNKAGAKYGTGYCDSQCPRDLKFINGEANVENWQSSTNDANAGTGKYGSCCSEMDVWEANNMAAAFTPHPCTVIGQSRCEGDSCGGTYSTDRYAGICDPDGCDFNSYRQGNKTFYGKGMTVDTTKKITVVTQFLKNSAGELSEIKRFYVQNGKVIPNSESTIPGVEGNSITQDWCDRQKAAFGDVTDFQDKGGMVQMGKALAGPMVLVMSIWDDHAVNMLWLDSTWPIDGAGKPGAERGACPTTSGVPAEVEAEAPNSNVIFSNIRFGPIGSTVSGLPDGGSGNPNPPVSSSTPVPSSSTTSSGSSGPTGGTGVAKHYEQCGGIGFTGPTQCESPYTCTKLNDWYSQCL

SEQ ID NO: 271 - protein, 509 aa, Myceliophthora thermophila
QNACTLTAENHPSLTWSKCTSGGSCTSVQGSITIDANWRWTHRTDSATNCYEGNKWDTSYCSDGPSCASKCCIDGADYSSTYGITTSGNSLNLKFVTKGQYSTNIGSRTYLMESDTKYQMFQLLGNEFTFDVDVSNLGCGLNGAVYFVSMDADGGMSKYSGNKAGAKYGTGYCDSQCPRDLKFINGEANVENWQSSTNDANAGTGKYGSCCSEMDVWEANNMAAAFTPHPCTVIGQSRCEGDSCGGTYSTDRYAGICDPDGCDFNSYRQGNKTFYGKGMTVDTTKKITVVTQFLKNSAGELSEIKRFYVQNGKVIPNSESTIPGVEGNSITQDWCDRQKAAFGDVTDFQDKGGMVQMGKALAGPMVLVMSIWDDHAVNMLWLDSTWPIDGAGKPGAERGACPTTSGVPAEVEAEAPNSNVIFSNIRFGPIGSTVSGLPDGGSGNPNPPVSSSTPVPSSSTTSSGSSGPTGGTGVAKHYEQCGGIGFTGPTQCESPYTCTKLNDWYSQCL

SEQ ID NO: 272 - protein, 509 aa, Myceliophthora thermophila
QNACTLTAENHPSLTWSKCTSGGSCTSVQGSITIDANWRWTHRTDSATNCYEGNKWDTSYCSDGPSCASKCCIDGADYSSTYGITTSGNSLNLKFVTKGQYSTNIGSRTYLMESDTKYQMFQLLGNEFTFDVDVSNLGCGLNGALYFVSMNADGGMSKYSGNKAGAKYGTGYCDSQCPRDLKFINGEANVENWQSSTNDANAGTGKYGSCCSEMDVWEANNMAAAFTPHPCTVIGQSRCEGDSCGGTYSTDRYAGICDPDGCDFNSYRQGNKTFYGKGMTVDTTKKITVVTQFLKNSAGELSEIKRFYVQNGKVIPNSESTIPGVEGNSITQDWCDRQKAAFGDVTDFQDKGGMVQMGKALAGPMVLVMSIWDDHAVNMLWLDSTWPIDGAGKPGAERGACPTTSGVPAEVEAEAPNSNVIFSNIRFGPIGSTVSGLPDGGSGNPNPPVSSSTPVPSSSTTSSGSSGPTGGTGVAKHYEQCGGIGFTGPTQCESPYTCTKLNDWYSQCL

SEQ ID NO: 273 - protein, 509 aa, Myceliophthora thermophila
QNACTLTAENHPSLTWSKCTSGGSCTSVQGSITIDANWRWTHRTDSATNCYEGNKWDTSYCSDGPSCASKCCIDGADYSSTYGITTSGNSLNLKFVTKGQYSTNIGSRTYLMESDTKYQMFQLLGNEFTFDVDVSNLGCGLNGALYFVSMDADGGMGKYSGNKAGAKYGTGYCDSQCPRDLKFINGEANVENWQSSTNDANAGTGKYGSCCSEMDVWEANNMAAAFTPHPCTVIGQSRCEGDSCGGTYSTDRYAGICDPDGCDFNSYRQGNKTFYGKGMTVDTTKKITVVTQFLKNSAGELSEIKRFYVQNGKVIPNSESTIPGVEGNSITQDWCDRQKAAFGDVTDFQDKGGMVQMGKALAGPMVLVMSIWDDHAVNMLWLDSTWPIDGAGKPGAERGACPTTSGVPAEVEAEAPNSNVIFSNIRFGPIGSTVSGLPDGGSGNPNPPVSSSTPVPSSSTTSSGSSGPTGGTGVAKHYEQCGGIGFTGPTQCESPYTCTKLNDWYSQCL

SEQ ID NO: 274 - protein, 509 aa, Myceliophthora thermophila
QNACTLTAENHPSLTWSKCTSGGSCTSVQGSITIDANWRWTHRTDSATNCYEGNKWDTSYCSDGPSCASKCCIDGADYSSTYGITTSGNSLNLKFVTKGQYSTNIGSRTYLMESDTKYQMFQLLGNEFTFDVDVSNLGCGLNGALYFVSMDADGGMSKYSGNKAGAKYGTGYCDSQCPRDLLFINGEANVENWQSSTNDANAGTGKYGSCCSEMDVWEANNMAAAFTPHPCTVIGQSRCEGDSCGGTYSTDRYAGICDPDGCDFNSYRQGNKTFYGKGMTVDTTKKITVVTQFLKNSAGELSEIKRFYVQNGKVIPNSESTIPGVEGNSITQDWCDRQKAAFGDVTDFQDKGGMVQMGKALAGPMVLVMSIWDDHAVNMLWLDSTWPIDGAGKPGAERGACPTTSGVPAEVEAEAPNSNVIFSNIRFGPIGSTVSGLPDGGSGNPNPPVSSSTPVPSSSTTSSGSSGPTGGTGVAKHYEQCGGIGFTGPTQCESPYTCTKLNDWYSQCL

SEQ ID NO: 275 - protein, 509 aa, Myceliophthora thermophila
QNACTLTAENHPSLTWSKCTSGGSCTSVQGSITIDANWRWTHRTDSATNCYEGNKWDTSYCSDGPSCASKCCIDGADYSSTYGITTSGNSLNLKFVTKGQYSTNIGSRTYLMESDTKYQMFQLLGNEFTFDVDVSNLGCGLNGALYFVSMDADGGMSKYSGNKAGAKYGTGYCDSQCPRDLKFNNGEANVENWQSSTNDANAGTGKYGSCCSEMDVWEANNMAAAFTPHPCTVIGQSRCEGDSCGGTYSTDRYAGICDPDGCDFNSYRQGNKTFYGKGMTVDTTKKITVVTQFLKNSAGELSEIKRFYVQNGKVIPNSESTIPGVEGNSITQDWCDRQKAAFGDVTDFQDKGGMVQMGKALAGPMVLVMSIWDDHAVNMLWLDSTWPIDGAGKPGAERGACPTTSGVPAEVEAEAPNSNVIFSNIRFGPIGSTVSGLPDGGSGNPNPPVSSSTPVPSSSTTSSGSSGPTGGTGVAKHYEQCGGIGFTGPTQCESPYTCTKLNDWYSQCL

SEQ ID NO: 276 - protein, 509 aa, Myceliophthora thermophila
QNACTLTAENHPSLTWSKCTSGGSCTSVQGSITIDANWRWTHRTDSATNCYEGNKWDTSYCSDGPSCASKCCIDGADYSSTYGITTSGNSLNLKFVTKGQYSTNIGSRTYLMESDTKYQMFQLLGNEFTFDVDVSNLGCGLNGALYFVSMDADGGMSKYSGNKAGAKYGTGYCDSQCPRDLKFISGEANVENWQSSTNDANAGTGKYGSCCSEMDVWEANNMAAAFTPHPCTVIGQSRCEGDSCGGTYSTDRYAGICDPDGCDFNSYRQGNKTFYGKGMTVDTTKKITVVTQFLKNSAGELSEIKRFYVQNGKVIPNSESTIPGVEGNSITQDWCDRQKAAFGDVTDFQDKGGMVQMGKALAGPMVLVMSIWDDHAVNMLWLDSTWPIDGAGKPGAERGACPTTSGVPAEVEAEAPNSNVIFSNIRFGPIGSTVSGLPDGGSGNPNPPVSSSTPVPSSSTTSSGSSGPTGGTGVAKHYEQCGGIGFTGPTQCESPYTCTKLNDWYSQCL

SEQ ID NO: 277 - protein, 509 aa, Myceliophthora thermophila
QNACTLTAENHPSLTWSKCTSGGSCTSVQGSITIDANWRWTHRTDSATNCYEGNKWDTSYCSDGPSCASKCCIDGADYSSTYGITTSGNSLNLKFVTKGQYSTNIGSRTYLMESDTKYQMFQLLGNEFTFDVDVSNLGCGLNGALYFVSMDADGGMSKYSGNKAGAKYGTGYCDSQCPRDLKFINGKANVENWQSSTNDANAGTGKYGSCCSEMDVWEANNMAAAFTPHPCTVIGQSRCEGDSCGGTYSTDRYAGICDPDGCDFNSYRQGNKTFYGKGMTVDTTKKITVVTQFLKNSAGELSEIKRFYVQNGKVIPNSESTIPGVEGNSITQDWCDRQKAAFGDVTDFQDKGGMVQMGKALAGPMVLVMSIWDDHAVNMLWLDSTWPIDGAGKPGAERGACPTTSGVPAEVEAEAPNSNVIFSNIRFGPIGSTVSGLPDGGSGNPNPPVSSSTPVPSSSTTSSGSSGPTGGTGVAKHYEQCGGIGFTGPTQCESPYTCTKLNDWYSQCL

SEQ ID NO: 278 - protein, 509 aa, Myceliophthora thermophila
QNACTLTAENHPSLTWSKCTSGGSCTSVQGSITIDANWRWTHRTDSATNCYEGNKWDTSYCSDGPSCASKCCIDGADYSSTYGITTSGNSLNLKFVTKGQYSTNIGSRTYLMESDTKYQMFQLLGNEFTFDVDVSNLGCGLNGALYFVSMDADGGMSKYSGNKAGAKYGTGYCDSQCPRDLKFINGEANVENWGSSTNDANAGTGKYGSCCSEMDVWEANNMAAAFTPHPCTVIGQSRCEGDSCGGTYSTDRYAGICDPDGCDFNSYRQGNKTFYGKGMTVDTTKKITVVTQFLKNSAGELSEIKRFYVQNGKVIPNSESTIPGVEGNSITQDWCDRQKAAFGDVTDFQDKGGMVQMGKALAGPMVLVMSIWDDHAVNMLWLDSTWPIDGAGKPGAERGACPTTSGVPAEVEAEAPNSNVIFSNIRFGPIGSTVSGLPDGGSGNPNPPVSSSTPVPSSSTTSSGSSGPTGGTGVAKHYEQCGGIGFTGPTQCESPYTCTKLNDWYSQCL

SEQ ID NO: 279 - protein, 509 aa, Myceliophthora thermophila
QNACTLTAENHPSLTWSKCTSGGSCTSVQGSITIDANWRWTHRTDSATNCYEGNKWDTSYCSDGPSCASKCCIDGADYSSTYGITTSGNSLNLKFVTKGQYSTNIGSRTYLMESDTKYQMFQLLGNEFTFDVDVSNLGCGLNGALYFVSMDADGGMSKYSGNKAGAKYGTGYCDSQCPRDLKFINGEANVENWQQSTNDANAGTGKYGSCCSEMDVWEANNMAAAFTPHPCTVIGQSRCEGDSCGGTYSTDRYAGICDPDGCDFNSYRQGNKTFYGKGMTVDTTKKITVVTQFLKNSAGELSEIKRFYVQNGKVIPNSESTIPGVEGNSITQDWCDRQKAAFGDVTDFQDKGGMVQMGKALAGPMVLVMSIWDDHAVNMLWLDSTWPIDGAGKPGAERGACPTTSGVPAEVEAEAPNSNVIFSNIRFGPIGSTVSGLPDGGSGNPNPPVSSSTPVPSSSTTSSGSSGPTGGTGVAKHYEQCGGIGFTGPTQCESPYTCTKLNDWYSQCL

SEQ ID NO: 280 - protein, 509 aa, Myceliophthora thermophila
QNACTLTAENHPSLTWSKCTSGGSCTSVQGSITIDANWRWTHRTDSATNCYEGNKWDTSYCSDGPSCASKCCIDGADYSSTYGITTSGNSLNLKFVTKGQYSTNIGSRTYLMESDTKYQMFQLLGNEFTFDVDVSNLGCGLNGALYFVSMDADGGMSKYSGNKAGAKYGTGYCDSQCPRDLKFINGEANVENWQSSTADANAGTGKYGSCCSEMDVWEANNMAAAFTPHPCTVIGQSRCEGDSCGGTYSTDRYAGICDPDGCDFNSYRQGNKTFYGKGMTVDTTKKITVVTQFLKNSAGELSEIKRFYVQNGKVIPNSESTIPGVEGNSITQDWCDRQKAAFGDVTDFQDKGGMVQMGKALAGPMVLVMSIWDDHAVNMLWLDSTWPIDGAGKPGAERGACPTTSGVPAEVEAEAPNSNVIFSNIRFGPIGSTVSGLPDGGSGNPNPPVSSSTPVPSSSTTSSGSSGPTGGTGVAKHYEQCGGIGFTGPTQCESPYTCTKLNDWYSQCL

SEQ ID NO: 281 - protein, 509 aa, Myceliophthora thermophila
QNACTLTAENHPSLTWSKCTSGGSCTSVQGSITIDANWRWTHRTDSATNCYEGNKWDTSYCSDGPSCASKCCIDGADYSSTYGITTSGNSLNLKFVTKGQYSTNIGSRTYLMESDTKYQMFQLLGNEFTFDVDVSNLGCGLNGALYFVSMDADGGMSKYSGNKAGAKYGTGYCDSQCPRDLKFINGEANVENWQSSTLDANAGTGKYGSCCSEMDVWEANNMAAAFTPHPCTVIGQSRCEGDSCGGTYSTDRYAGICDPDGCDFNSYRQGNKTFYGKGMTVDTTKKITVVTQFLKNSAGELSEIKRFYVQNGKVIPNSESTIPGVEGNSITQDWCDRQKAAFGDVTDFQDKGGMVQMGKALAGPMVLVMSIWDDHAVNMLWLDSTWPIDGAGKPGAERGACPTTSGVPAEVEAEAPNSNVIFSNIRFGPIGSTVSGLPDGGSGNPNPPVSSSTPVPSSSTTSSGSSGPTGGTGVAKHYEQCGGIGFTGPTQCESPYTCTKLNDWYSQCL

SEQ ID NO: 282 - protein, 509 aa, Myceliophthora thermophila
QNACTLTAENHPSLTWSKCTSGGSCTSVQGSITIDANWRWTHRTDSATNCYEGNKWDTSYCSDGPSCASKCCIDGADYSSTYGITTSGNSLNLKFVTKGQYSTNIGSRTYLMESDTKYQMFQLLGNEFTFDVDVSNLGCGLNGALYFVSMDADGGMSKYSGNKAGAKYGTGYCDSQCPRDLKFINGEANVENWQSSTQDANAGTGKYGSCCSEMDVWEANNMAAAFTPHPCTVIGQSRCEGDSCGGTYSTDRYAGICDPDGCDFNSYRQGNKTFYGKGMTVDTTKKITVVTQFLKNSAGELSEIKRFYVQNGKVIPNSESTIPGVEGNSITQDWCDRQKAAFGDVTDFQDKGGMVQMGKALAGPMVLVMSIWDDHAVNMLWLDSTWPIDGAGKPGAERGACPTTSGVPAEVEAEAPNSNVIFSNIRFGPIGSTVSGLPDGGSGNPNPPVSSSTPVPSSSTTSSGSSGPTGGTGVAKHYEQCGGIGFTGPTQCESPYTCTKLNDWYSQCL

SEQ ID NO: 283 - protein, 509 aa, Myceliophthora thermophila
QNACTLTAENHPSLTWSKCTSGGSCTSVQGSITIDANWRWTHRTDSATNCYEGNKWDTSYCSDGPSCASKCCIDGADYSSTYGITTSGNSLNLKFVTKGQYSTNIGSRTYLMESDTKYQMFQLLGNEFTFDVDVSNLGCGLNGALYFVSMDADGGMSKYSGNKAGAKYGTGYCDSQCPRDLKFINGEANVENWQSSTVDANAGTGKYGSCCSEMDVWEANNMAAAFTPHPCTVIGQSRCEGDSCGGTYSTDRYAGICDPDGCDFNSYRQGNKTFYGKGMTVDTTKKITVVTQFLKNSAGELSEIKRFYVQNGKVIPNSESTIPGVEGNSITQDWCDRQKAAFGDVTDFQDKGGMVQMGKALAGPMVLVMSIWDDHAVNMLWLDSTWPIDGAGKPGAERGACPTTSGVPAEVEAEAPNSNVIFSNIRFGPIGSTVSGLPDGGSGNPNPPVSSSTPVPSSSTTSSGSSGPTGGTGVAKHYEQCGGIGFTGPTQCESPYTCTKLNDWYSQCL

SEQ ID NO: 284 - protein, 509 aa, Myceliophthora thermophila
QNACTLTAENHPSLTWSKCTSGGSCTSVQGSITIDANWRWTHRTDSATNCYEGNKWDTSYCSDGPSCASKCCIDGADYSSTYGITTSGNSLNLKFVTKGQYSTNIGSRTYLMESDTKYQMFQLLGNEFTFDVDVSNLGCGLNGALYFVSMDADGGMSKYSGNKAGAKYGTGYCDSQCPRDLKFINGEANVENWQSSTWDANAGTGKYGSCCSEMDVWEANNMAAAFTPHPCTVIGQSRCEGDSCGGTYSTDRYAGICDPDGCDFNSYRQGNKTFYGKGMTVDTTKKITVVTQFLKNSAGELSEIKRFYVQNGKVIPNSESTIPGVEGNSITQDWCDRQKAAFGDVTDFQDKGGMVQMGKALAGPMVLVMSIWDDHAVNMLWLDSTWPIDGAGKPGAERGACPTTSGVPAEVEAEAPNSNVIFSNIRFGPIGSTVSGLPDGGSGNPNPPVSSSTPVPSSSTTSSGSSGPTGGTGVAKHYEQCGGIGFTGPTQCESPYTCTKLNDWYSQCL

SEQ ID NO: 285 - protein, 509 aa, Myceliophthora thermophila
QNACTLTAENHPSLTWSKCTSGGSCTSVQGSITIDANWRWTHRTDSATNCYEGNKWDTSYCSDGPSCASKCCIDGADYSSTYGITTSGNSLNLKFVTKGQYSTNIGSRTYLMESDTKYQMFQLLGNEFTFDVDVSNLGCGLNGALYFVSMDADGGMSKYSGNKAGAKYGTGYCDSQCPRDLKFINGEANVENWQSSTNDACAGTGKYGSCCSEMDVWEANNMAAAFTPHPCTVIGQSRCEGDSCGGTYSTDRYAGICDPDGCDFNSYRQGNKTFYGKGMTVDTTKKITVVTQFLKNSAGELSEIKRFYVQNGKVIPNSESTIPGVEGNSITQDWCDRQKAAFGDVTDFQDKGGMVQMGKALAGPMVLVMSIWDDHAVNMLWLDSTWPIDGAGKPGAERGACPTTSGVPAEVEAEAPNSNVIFSNIRFGPIGSTVSGLPDGGSGNPNPPVSSSTPVPSSSTTSSGSSGPTGGTGVAKHYEQCGGIGFTGPTQCESPYTCTKLNDWYSQCL

SEQ ID NO: 286 - protein, 509 aa, Myceliophthora thermophila
QNACTLTAENHPSLTWSKCTSGGSCTSVQGSITIDANWRWTHRTDSATNCYEGNKWDTSYCSDGPSCASKCCIDGADYSSTYGITTSGNSLNLKFVTKGQYSTNIGSRTYLMESDTKYQMFQLLGNEFTFDVDVSNLGCGLNGALYFVSMDADGGMSKYSGNKAGAKYGTGYCDSQCPRDLKFINGEANVENWQSSTNDAFAGTGKYGSCCSEMDVWEANNMAAAFTPHPCTVIGQSRCEGDSCGGTYSTDRYAGICDPDGCDFNSYRQGNKTFYGKGMTVDTTKKITVVTQFLKNSAGELSEIKRFYVQNGKVIPNSESTIPGVEGNSITQDWCDRQKAAFGDVTDFQDKGGMVQMGKALAGPMVLVMSIWDDHAVNMLWLDSTWPIDGAGKPGAERGACPTTSGVPAEVEAEAPNSNVIFSNIRFGPIGSTVSGLPDGGSGNPNPPVSSSTPVPSSSTTSSGSSGPTGGTGVAKHYEQCGGIGFTGPTQCESPYTCTKLNDWYSQCL

SEQ ID NO: 287 - protein, 509 aa, Myceliophthora thermophila
QNACTLTAENHPSLTWSKCTSGGSCTSVQGSITIDANWRWTHRTDSATNCYEGNKWDTSYCSDGPSCASKCCIDGADYSSTYGITTSGNSLNLKFVTKGQYSTNIGSRTYLMESDTKYQMFQLLGNEFTFDVDVSNLGCGLNGALYFVSMDADGGMSKYSGNKAGAKYGTGYCDSQCPRDLKFINGEANVENWQSSTNDANAGTGKYGSSCSEMDVWEANNMAAAFTPHPCTVIGQSRCEGDSCGGTYSTDRYAGICDPDGCDFNSYRQGNKTFYGKGMTVDTTKKITVVTQFLKNSAGELSEIKRFYVQNGKVIPNSESTIPGVEGNSITQDWCDRQKAAFGDVTDFQDKGGMVQMGKALAGPMVLVMSIWDDHAVNMLWLDSTWPIDGAGKPGAERGACPTTSGVPAEVEAEAPNSNVIFSNIRFGPIGSTVSGLPDGGSGNPNPPVSSSTPVPSSSTTSSGSSGPTGGTGVAKHYEQCGGIGFTGPTQCESPYTCTKLNDWYSQCL

SEQ ID NO: 288 - protein, 509 aa, Myceliophthora thermophila
QNACTLTAENHPSLTWSKCTSGGSCTSVQGSITIDANWRWTHRTDSATNCYEGNKWDTSYCSDGPSCASKCCIDGADYSSTYGITTSGNSLNLKFVTKGQYSTNIGSRTYLMESDTKYQMFQLLGNEFTFDVDVSNLGCGLNGALYFVSMDADGGMSKYSGNKAGAKYGTGYCDSQCPRDLKFINGEANVENWQSSTNDANAGTGKYGSCCTEMDVWEANNMAAAFTPHPCTVIGQSRCEGDSCGGTYSTDRYAGICDPDGCDFNSYRQGNKTFYGKGMTVDTTKKITVVTQFLKNSAGELSEIKRFYVQNGKVIPNSESTIPGVEGNSITQDWCDRQKAAFGDVTDFQDKGGMVQMGKALAGPMVLVMSIWDDHAVNMLWLDSTWPIDGAGKPGAERGACPTTSGVPAEVEAEAPNSNVIFSNIRFGPIGSTVSGLPDGGSGNPNPPVSSSTPVPSSSTTSSGSSGPTGGTGVAKHYEQCGGIGFTGPTQCESPYTCTKLNDWYSQCL

SEQ ID NO: 289 - protein, 509 aa, Myceliophthora thermophila
QNACTLTAENHPSLTWSKCTSGGSCTSVQGSITIDANWRWTHRTDSATNCYEGNKWDTSYCSDGPSCASKCCIDGADYSSTYGITTSGNSLNLKFVTKGQYSTNIGSRTYLMESDTKYQMFQLLGNEFTFDVDVSNLGCGLNGALYFVSMDADGGMSKYSGNKAGAKYGTGYCDSQCPRDLKFINGEANVENWQSSTNDANAGTGKYGSCCSEIDVWEANNMAAAFTPHPCTVIGQSRCEGDSCGGTYSTDRYAGICDPDGCDFNSYRQGNKTFYGKGMTVDTTKKITVVTQFLKNSAGELSEIKRFYVQNGKVIPNSESTIPGVEGNSITQDWCDRQKAAFGDVTDFQDKGGMVQMGKALAGPMVLVMSIWDDHAVNMLWLDSTWPIDGAGKPGAERGACPTTSGVPAEVEAEAPNSNVIFSNIRFGPIGSTVSGLPDGGSGNPNPPVSSSTPVPSSSTTSSGSSGPTGGTGVAKHYEQCGGIGFTGPTQCESPYTCTKLNDWYSQCL

SEQ ID NO: 290 - protein, 509 aa, Myceliophthora thermophila
QNACTLTAENHPSLTWSKCTSGGSCTSVQGSITIDANWRWTHRTDSATNCYEGNKWDTSYCSDGPSCASKCCIDGADYSSTYGITTSGNSLNLKFVTKGQYSTNIGSRTYLMESDTKYQMFQLLGNEFTFDVDVSNLGCGLNGALYFVSMDADGGMSKYSGNKAGAKYGTGYCDSQCPRDLKFINGEANVENWQSSTNDANAGTGKYGSCCSEMDVWEASNMAAAFTPHPCTVIGQSRCEGDSCGGTYSTDRYAGICDPDGCDFNSYRQGNKTFYGKGMTVDTTKKITVVTQFLKNSAGELSEIKRFYVQNGKVIPNSESTIPGVEGNSITQDWCDRQKAAFGDVTDFQDKGGMVQMGKALAGPMVLVMSIWDDHAVNMLWLDSTWPIDGAGKPGAERGACPTTSGVPAEVEAEAPNSNVIFSNIRFGPIGSTVSGLPDGGSGNPNPPVSSSTPVPSSSTTSSGSSGPTGGTGVAKHYEQCGGIGFTGPTQCESPYTCTKLNDWYSQCL

SEQ ID NO: 291 - protein, 509 aa, Myceliophthora thermophila
QNACTLTAENHPSLTWSKCTSGGSCTSVQGSITIDANWRWTHRTDSATNCYEGNKWDTSYCSDGPSCASKCCIDGADYSSTYGITTSGNSLNLKFVTKGQYSTNIGSRTYLMESDTKYQMFQLLGNEFTFDVDVSNLGCGLNGALYFVSMDADGGMSKYSGNKAGAKYGTGYCDSQCPRDLKFINGEANVENWQSSTNDANAGTGKYGSCCSEMDVWEANNMAAAFTPHPCTVIGQSTCEGDSCGGTYSTDRYAGICDPDGCDFNSYRQGNKTFYGKGMTVDTTKKITVVTQFLKNSAGELSEIKRFYVQNGKVIPNSESTIPGVEGNSITQDWCDRQKAAFGDVTDFQDKGGMVQMGKALAGPMVLVMSIWDDHAVNMLWLDSTWPIDGAGKPGAERGACPTTSGVPAEVEAEAPNSNVIFSNIRFGPIGSTVSGLPDGGSGNPNPPVSSSTPVPSSSTTSSGSSGPTGGTGVAKHYEQCGGIGFTGPTQCESPYTCTKLNDWYSQCL

SEQ ID NO: 292 - protein, 509 aa, Myceliophthora thermophila
QNACTLTAENHPSLTWSKCTSGGSCTSVQGSITIDANWRWTHRTDSATNCYEGNKWDTSYCSDGPSCASKCCIDGADYSSTYGITTSGNSLNLKFVTKGQYSTNIGSRTYLMESDTKYQMFQLLGNEFTFDVDVSNLGCGLNGALYFVSMDADGGMSKYSGNKAGAKYGTGYCDSQCPRDLKFINGEANVENWQSSTNDANAGTGKYGSCCSEMDVWEANNMAAAFTPHPCTVIGQSRCEGLSCGGTYSTDRYAGICDPDGCDFNSYRQGNKTFYGKGMTVDTTKKITVVTQFLKNSAGELSEIKRFYVQNGKVIPNSESTIPGVEGNSITQDWCDRQKAAFGDVTDFQDKGGMVQMGKALAGPMVLVMSIWDDHAVNMLWLDSTWPIDGAGKPGAERGACPTTSGVPAEVEAEAPNSNVIFSNIRFGPIGSTVSGLPDGGSGNPNPPVSSSTPVPSSSTTSSGSSGPTGGTGVAKHYEQCGGIGFTGPTQCESPYTCTKLNDWYSQCL

SEQ ID NO: 293 - protein, 509 aa, Myceliophthora thermophila
QNACTLTAENHPSLTWSKCTSGGSCTSVQGSITIDANWRWTHRTDSATNCYEGNKWDTSYCSDGPSCASKCCIDGADYSSTYGITTSGNSLNLKFVTKGQYSTNIGSRTYLMESDTKYQMFQLLGNEFTFDVDVSNLGCGLNGALYFVSMDADGGMSKYSGNKAGAKYGTGYCDSQCPRDLKFINGEANVENWQSSTNDANAGTGKYGSCCSEMDVWEANNMAAAFTPHPCTVIGQSRCEGRSCGGTYSTDRYAGICDPDGCDFNSYRQGNKTFYGKGMTVDTTKKITVVTQFLKNSAGELSEIKRFYVQNGKVIPNSESTIPGVEGNSITQDWCDRQKAAFGDVTDFQDKGGMVQMGKALAGPMVLVMSIWDDHAVNMLWLDSTWPIDGAGKPGAERGACPTTSGVPAEVEAEAPNSNVIFSNIRFGPIGSTVSGLPDGGSGNPNPPVSSSTPVPSSSTTSSGSSGPTGGTGVAKHYEQCGGIGFTGPTQCESPYTCTKLNDWYSQCL

SEQ ID NO: 294 - protein, 509 aa, Myceliophthora thermophila
QNACTLTAENHPSLTWSKCTSGGSCTSVQGSITIDANWRWTHRTDSATNCYEGNKWDTSYCSDGPSCASKCCIDGADYSSTYGITTSGNSLNLKFVTKGQYSTNIGSRTYLMESDTKYQMFQLLGNEFTFDVDVSNLGCGLNGALYFVSMDADGGMSKYSGNKAGAKYGTGYCDSQCPRDLKFINGEANVENWQSSTNDANAGTGKYGSCCSEMDVWEANNMAAAFTPHPCTVIGQSRCEGVSCGGTYSTDRYAGICDPDGCDFNSYRQGNKTFYGKGMTVDTTKKITVVTQFLKNSAGELSEIKRFYVQNGKVIPNSESTIPGVEGNSITQDWCDRQKAAFGDVTDFQDKGGMVQMGKALAGPMVLVMSIWDDHAVNMLWLDSTWPIDGAGKPGAERGACPTTSGVPAEVEAEAPNSNVIFSNIRFGPIGSTVSGLPDGGSGNPNPPVSSSTPVPSSSTTSSGSSGPTGGTGVAKHYEQCGGIGFTGPTQCESPYTCTKLNDWYSQCL

SEQ ID NO: 295 - protein, 509 aa, Myceliophthora thermophila
QNACTLTAENHPSLTWSKCTSGGSCTSVQGSITIDANWRWTHRTDSATNCYEGNKWDTSYCSDGPSCASKCCIDGADYSSTYGITTSGNSLNLKFVTKGQYSTNIGSRTYLMESDTKYQMFQLLGNEFTFDVDVSNLGCGLNGALYFVSMDADGGMSKYSGNKAGAKYGTGYCDSQCPRDLKFINGEANVENWQSSTNDANAGTGKYGSCCSEMDVWEANNMAAAFTPHPCTVIGQSRCEGDSCGGSYSTDRYAGICDPDGCDFNSYRQGNKTFYGKGMTVDTTKKITVVTQFLKNSAGELSEIKRFYVQNGKVIPNSESTIPGVEGNSITQDWCDRQKAAFGDVTDFQDKGGMVQMGKALAGPMVLVMSIWDDHAVNMLWLDSTWPIDGAGKPGAERGACPTTSGVPAEVEAEAPNSNVIFSNIRFGPIGSTVSGLPDGGSGNPNPPVSSSTPVPSSSTTSSGSSGPTGGTGVAKHYEQCGGIGFTGPTQCESPYTCTKLNDWYSQCL

SEQ ID NO: 296 - protein, 509 aa, Myceliophthora thermophila
QNACTLTAENHPSLTWSKCTSGGSCTSVQGSITIDANWRWTHRTDSATNCYEGNKWDTSYCSDGPSCASKCCIDGADYSSTYGITTSGNSLNLKFVTKGQYSTNIGSRTYLMESDTKYQMFQLLGNEFTFDVDVSNLGCGLNGALYFVSMDADGGMSKYSGNKAGAKYGTGYCDSQCPRDLKFINGEANVENWQSSTNDANAGTGKYGSCCSEMDVWEANNMAAAFTPHPCTVIGQSRCEGDSCGGTYSCDRYAGICDPDGCDFNSYRQGNKTFYGKGMTVDTTKKITVVTQFLKNSAGELSEIKRFYVQNGKVIPNSESTIPGVEGNSITQDWCDRQKAAFGDVTDFQDKGGMVQMGKALAGPMVLVMSIWDDHAVNMLWLDSTWPIDGAGKPGAERGACPTTSGVPAEVEAEAPNSNVIFSNIRFGPIGSTVSGLPDGGSGNPNPPVSSSTPVPSSSTTSSGSSGPTGGTGVAKHYEQCGGIGFTGPTQCESPYTCTKLNDWYSQCL

SEQ ID NO: 297 - protein, 509 aa, Myceliophthora thermophila
QNACTLTAENHPSLTWSKCTSGGSCTSVQGSITIDANWRWTHRTDSATNCYEGNKWDTSYCSDGPSCASKCCIDGADYSSTYGITTSGNSLNLKFVTKGQYSTNIGSRTYLMESDTKYQMFQLLGNEFTFDVDVSNLGCGLNGALYFVSMDADGGMSKYSGNKAGAKYGTGYCDSQCPRDLKFINGEANVENWQSSTNDANAGTGKYGSCCSEMDVWEANNMAAAFTPHPCTVIGQSRCEGDSCGGTYSNDRYAGICDPDGCDFNSYRQGNKTFYGKGMTVDTTKKITVVTQFLKNSAGELSEIKRFYVQNGKVIPNSESTIPGVEGNSITQDWCDRQKAAFGDVTDFQDKGGMVQMGKALAGPMVLVMSIWDDHAVNMLWLDSTWPIDGAGKPGAERGACPTTSGVPAEVEAEAPNSNVIFSNIRFGPIGSTVSGLPDGGSGNPNPPVSSSTPVPSSSTTSSGSSGPTGGTGVAKHYEQCGGIGFTGPTQCESPYTCTKLNDWYSQCL

SEQ ID NO: 298 - protein, 509 aa, Myceliophthora thermophila
QNACTLTAENHPSLTWSKCTSGGSCTSVQGSITIDANWRWTHRTDSATNCYEGNKWDTSYCSDGPSCASKCCIDGADYSSTYGITTSGNSLNLKFVTKGQYSTNIGSRTYLMESDTKYQMFQLLGNEFTFDVDVSNLGCGLNGALYFVSMDADGGMSKYSGNKAGAKYGTGYCDSQCPRDLKFINGEANVENWQSSTNDANAGTGKYGSCCSEMDVWEANNMAAAFTPHPCTVIGQSRCEGDSCGGTYSTDRYDGICDPDGCDFNSYRQGNKTFYGKGMTVDTTKKITVVTQFLKNSAGELSEIKRFYVQNGKVIPNSESTIPGVEGNSITQDWCDRQKAAFGDVTDFQDKGGMVQMGKALAGPMVLVMSIWDDHAVNMLWLDSTWPIDGAGKPGAERGACPTTSGVPAEVEAEAPNSNVIFSNIRFGPIGSTVSGLPDGGSGNPNPPVSSSTPVPSSSTTSSGSSGPTGGTGVAKHYEQCGGIGFTGPTQCESPYTCTKLNDWYSQCL

SEQ ID NO: 299 - protein, 509 aa, Myceliophthora thermophila
QNACTLTAENHPSLTWSKCTSGGSCTSVQGSITIDANWRWTHRTDSATNCYEGNKWDTSYCSDGPSCASKCCIDGADYSSTYGITTSGNSLNLKFVTKGQYSTNIGSRTYLMESDTKYQMFQLLGNEFTFDVDVSNLGCGLNGALYFVSMDADGGMSKYSGNKAGAKYGTGYCDSQCPRDLKFINGEANVENWQSSTNDANAGTGKYGSCCSEMDVWEANNMAAAFTPHPCTVIGQSRCEGDSCGGTYSTDRYRGICDPDGCDFNSYRQGNKTFYGKGMTVDTTKKITVVTQFLKNSAGELSEIKRFYVQNGKVIPNSESTIPGVEGNSITQDWCDRQKAAFGDVTDFQDKGGMVQMGKALAGPMVLVMSIWDDHAVNMLWLDSTWPIDGAGKPGAERGACPTTSGVPAEVEAEAPNSNVIFSNIRFGPIGSTVSGLPDGGSGNPNPPVSSSTPVPSSSTTSSGSSGPTGGTGVAKHYEQCGGIGFTGPTQCESPYTCTKLNDWYSQCL

SEQ ID NO: 300 - protein, 509 aa, Myceliophthora thermophila
QNACTLTAENHPSLTWSKCTSGGSCTSVQGSITIDANWRWTHRTDSATNCYEGNKWDTSYCSDGPSCASKCCIDGADYSSTYGITTSGNSLNLKFVTKGQYSTNIGSRTYLMESDTKYQMFQLLGNEFTFDVDVSNLGCGLNGALYFVSMDADGGMSKYSGNKAGAKYGTGYCDSQCPRDLKFINGEANVENWQSSTNDANAGTGKYGSCCSEMDVWEANNMAAAFTPHPCTVIGQSRCEGDSCGGTYSTDRYAGICDPDDCDFNSYRQGNKTFYGKGMTVDTTKKITVVTQFLKNSAGELSEIKRFYVQNGKVIPNSESTIPGVEGNSITQDWCDRQKAAFGDVTDFQDKGGMVQMGKALAGPMVLVMSIWDDHAVNMLWLDSTWPIDGAGKPGAERGACPTTSGVPAEVEAEAPNSNVIFSNIRFGPIGSTVSGLPDGGSGNPNPPVSSSTPVPSSSTTSSGSSGPTGGTGVAKHYEQCGGIGFTGPTQCESPYTCTKLNDWYSQCL

SEQ ID NO: 301 - protein, 509 aa, Myceliophthora thermophila
QNACTLTAENHPSLTWSKCTSGGSCTSVQGSITIDANWRWTHRTDSATNCYEGNKWDTSYCSDGPSCASKCCIDGADYSSTYGITTSGNSLNLKFVTKGQYSTNIGSRTYLMESDTKYQMFQLLGNEFTFDVDVSNLGCGLNGALYFVSMDADGGMSKYSGNKAGAKYGTGYCDSQCPRDLKFINGEANVENWQSSTNDANAGTGKYGSCCSEMDVWEANNMAAAFTPHPCTVIGQSRCEGDSCGGTYSTDRYAGICDPDGCDFCSYRQGNKTFYGKGMTVDTTKKITVVTQFLKNSAGELSEIKRFYVQNGKVIPNSESTIPGVEGNSITQDWCDRQKAAFGDVTDFQDKGGMVQMGKALAGPMVLVMSIWDDHAVNMLWLDSTWPIDGAGKPGAERGACPTTSGVPAEVEAEAPNSNVIFSNIRFGPIGSTVSGLPDGGSGNPNPPVSSSTPVPSSSTTSSGSSGPTGGTGVAKHYEQCGGIGFTGPTQCESPYTCTKLNDWYSQCL

SEQ ID NO: 302 - protein, 509 aa, Myceliophthora thermophila
QNACTLTAENHPSLTWSKCTSGGSCTSVQGSITIDANWRWTHRTDSATNCYEGNKWDTSYCSDGPSCASKCCIDGADYSSTYGITTSGNSLNLKFVTKGQYSTNIGSRTYLMESDTKYQMFQLLGNEFTFDVDVSNLGCGLNGALYFVSMDADGGMSKYSGNKAGAKYGTGYCDSQCPRDLKFINGEANVENWQSSTNDANAGTGKYGSCCSEMDVWEANNMAAAFTPHPCTVIGQSRCEGDSCGGTYSTDRYAGICDPDGCDFYSYRQGNKTFYGKGMTVDTTKKITVVTQFLKNSAGELSEIKRFYVQNGKVIPNSESTIPGVEGNSITQDWCDRQKAAFGDVTDFQDKGGMVQMGKALAGPMVLVMSIWDDHAVNMLWLDSTWPIDGAGKPGAERGACPTTSGVPAEVEAEAPNSNVIFSNIRFGPIGSTVSGLPDGGSGNPNPPVSSSTPVPSSSTTSSGSSGPTGGTGVAKHYEQCGGIGFTGPTQCESPYTCTKLNDWYSQCL

SEQ ID NO: 303 - protein, 509 aa, Myceliophthora thermophila
QNACTLTAENHPSLTWSKCTSGGSCTSVQGSITIDANWRWTHRTDSATNCYEGNKWDTSYCSDGPSCASKCCIDGADYSSTYGITTSGNSLNLKFVTKGQYSTNIGSRTYLMESDTKYQMFQLLGNEFTFDVDVSNLGCGLNGALYFVSMDADGGMSKYSGNKAGAKYGTGYCDSQCPRDLKFINGEANVENWQSSTNDANAGTGKYGSCCSEMDVWEANNMAAAFTPHPCTVIGQSRCEGDSCGGTYSTDRYAGICDPDGCDFNTYRQGNKTFYGKGMTVDTTKKITVVTQFLKNSAGELSEIKRFYVQNGKVIPNSESTIPGVEGNSITQDWCDRQKAAFGDVTDFQDKGGMVQMGKALAGPMVLVMSIWDDHAVNMLWLDSTWPIDGAGKPGAERGACPTTSGVPAEVEAEAPNSNVIFSNIRFGPIGSTVSGLPDGGSGNPNPPVSSSTPVPSSSTTSSGSSGPTGGTGVAKHYEQCGGIGFTGPTQCESPYTCTKLNDWYSQCL

SEQ ID NO: 304 - protein, 509 aa, Myceliophthora thermophila
QNACTLTAENHPSLTWSKCTSGGSCTSVQGSITIDANWRWTHRTDSATNCYEGNKWDTSYCSDGPSCASKCCIDGADYSSTYGITTSGNSLNLKFVTKGQYSTNIGSRTYLMESDTKYQMFQLLGNEFTFDVDVSNLGCGLNGALYFVSMDADGGMSKYSGNKAGAKYGTGYCDSQCPRDLKFINGEANVENWQSSTNDANAGTGKYGSCCSEMDVWEANNMAAAFTPHPCTVIGQSRCEGDSCGGTYSTDRYAGICDPDGCDFNSYRQGNITFYGKGMTVDTTKKITVVTQFLKNSAGELSEIKRFYVQNGKVIPNSESTIPGVEGNSITQDWCDRQKAAFGDVTDFQDKGGMVQMGKALAGPMVLVMSIWDDHAVNMLWLDSTWPIDGAGKPGAERGACPTTSGVPAEVEAEAPNSNVIFSNIRFGPIGSTVSGLPDGGSGNPNPPVSSSTPVPSSSTTSSGSSGPTGGTGVAKHYEQCGGIGFTGPTQCESPYTCTKLNDWYSQCL

SEQ ID NO: 305 - protein, 509 aa, Myceliophthora thermophila
QNACTLTAENHPSLTWSKCTSGGSCTSVQGSITIDANWRWTHRTDSATNCYEGNKWDTSYCSDGPSCASKCCIDGADYSSTYGITTSGNSLNLKFVTKGQYSTNIGSRTYLMESDTKYQMFQLLGNEFTFDVDVSNLGCGLNGALYFVSMDADGGMSKYSGNKAGAKYGTGYCDSQCPRDLKFINGEANVENWQSSTNDANAGTGKYGSCCSEMDVWEANNMAAAFTPHPCTVIGQSRCEGDSCGGTYSTDRYAGICDPDGCDFNSYRQGNKTFYGKGMAVDTTKKITVVTQFLKNSAGELSEIKRFYVQNGKVIPNSESTIPGVEGNSITQDWCDRQKAAFGDVTDFQDKGGMVQMGKALAGPMVLVMSIWDDHAVNMLWLDSTWPIDGAGKPGAERGACPTTSGVPAEVEAEAPNSNVIFSNIRFGPIGSTVSGLPDGGSGNPNPPVSSSTPVPSSSTTSSGSSGPTGGTGVAKHYEQCGGIGFTGPTQCESPYTCTKLNDWYSQCL

SEQ ID NO: 306 - protein, 509 aa, Myceliophthora thermophila
QNACTLTAENHPSLTWSKCTSGGSCTSVQGSITIDANWRWTHRTDSATNCYEGNKWDTSYCSDGPSCASKCCIDGADYSSTYGITTSGNSLNLKFVTKGQYSTNIGSRTYLMESDTKYQMFQLLGNEFTFDVDVSNLGCGLNGALYFVSMDADGGMSKYSGNKAGAKYGTGYCDSQCPRDLKFINGEANVENWQSSTNDANAGTGKYGSCCSEMDVWEANNMAAAFTPHPCTVIGQSRCEGDSCGGTYSTDRYAGICDPDGCDFNSYRQGNKTFYGKGMIVDTTKKITVVTQFLKNSAGELSEIKRFYVQNGKVIPNSESTIPGVEGNSITQDWCDRQKAAFGDVTDFQDKGGMVQMGKALAGPMVLVMSIWDDHAVNMLWLDSTWPIDGAGKPGAERGACPTTSGVPAEVEAEAPNSNVIFSNIRFGPIGSTVSGLPDGGSGNPNPPVSSSTPVPSSSTTSSGSSGPTGGTGVAKHYEQCGGIGFTGPTQCESPYTCTKLNDWYSQCL

SEQ ID NO: 307 - protein, 509 aa, Myceliophthora thermophila
QNACTLTAENHPSLTWSKCTSGGSCTSVQGSITIDANWRWTHRTDSATNCYEGNKWDTSYCSDGPSCASKCCIDGADYSSTYGITTSGNSLNLKFVTKGQYSTNIGSRTYLMESDTKYQMFQLLGNEFTFDVDVSNLGCGLNGALYFVSMDADGGMSKYSGNKAGAKYGTGYCDSQCPRDLKFINGEANVENWQSSTNDANAGTGKYGSCCSEMDVWEANNMAAAFTPHPCTVIGQSRCEGDSCGGTYSTDRYAGICDPDGCDFNSYRQGNKTFYGKGMTVDTTEKITVVTQFLKNSAGELSEIKRFYVQNGKVIPNSESTIPGVEGNSITQDWCDRQKAAFGDVTDFQDKGGMVQMGKALAGPMVLVMSIWDDHAVNMLWLDSTWPIDGAGKPGAERGACPTTSGVPAEVEAEAPNSNVIFSNIRFGPIGSTVSGLPDGGSGNPNPPVSSSTPVPSSSTTSSGSSGPTGGTGVAKHYEQCGGIGFTGPTQCESPYTCTKLNDWYSQCL

SEQ ID NO: 308 - protein, 509 aa, Myceliophthora thermophila
QNACTLTAENHPSLTWSKCTSGGSCTSVQGSITIDANWRWTHRTDSATNCYEGNKWDTSYCSDGPSCASKCCIDGADYSSTYGITTSGNSLNLKFVTKGQYSTNIGSRTYLMESDTKYQMFQLLGNEFTFDVDVSNLGCGLNGALYFVSMDADGGMSKYSGNKAGAKYGTGYCDSQCPRDLKFINGEANVENWQSSTNDANAGTGKYGSCCSEMDVWEANNMAAAFTPHPCTVIGQSRCEGDSCGGTYSTDRYAGICDPDGCDFNSYRQGNKTFYGKGMTVDTTKKITVVTQFLKNSTGELSEIKRFYVQNGKVIPNSESTIPGVEGNSITQDWCDRQKAAFGDVTDFQDKGGMVQMGKALAGPMVLVMSIWDDHAVNMLWLDSTWPIDGAGKPGAERGACPTTSGVPAEVEAEAPNSNVIFSNIRFGPIGSTVSGLPDGGSGNPNPPVSSSTPVPSSSTTSSGSSGPTGGTGVAKHYEQCGGIGFTGPTQCESPYTCTKLNDWYSQCL

SEQ ID NO: 309 - protein, 509 aa, Myceliophthora thermophila
QNACTLTAENHPSLTWSKCTSGGSCTSVQGSITIDANWRWTHRTDSATNCYEGNKWDTSYCSDGPSCASKCCIDGADYSSTYGITTSGNSLNLKFVTKGQYSTNIGSRTYLMESDTKYQMFQLLGNEFTFDVDVSNLGCGLNGALYFVSMDADGGMSKYSGNKAGAKYGTGYCDSQCPRDLKFINGEANVENWQSSTNDANAGTGKYGSCCSEMDVWEANNMAAAFTPHPCTVIGQSRCEGDSCGGTYSTDRYAGICDPDGCDFNSYRQGNKTFYGKGMTVDTTKKITVVTQFLKNSAGELSEIKRFYVQNGKVLPNSESTIPGVEGNSITQDWCDRQKAAFGDVTDFQDKGGMVQMGKALAGPMVLVMSIWDDHAVNMLWLDSTWPIDGAGKPGAERGACPTTSGVPAEVEAEAPNSNVIFSNIRFGPIGSTVSGLPDGGSGNPNPPVSSSTPVPSSSTTSSGSSGPTGGTGVAKHYEQCGGIGFTGPTQCESPYTCTKLNDWYSQCL

SEQ ID NO: 310 - protein, 509 aa, Myceliophthora thermophila
QNACTLTAENHPSLTWSKCTSGGSCTSVQGSITIDANWRWTHRTDSATNCYEGNKWDTSYCSDGPSCASKCCIDGADYSSTYGITTSGNSLNLKFVTKGQYSTNIGSRTYLMESDTKYQMFQLLGNEFTFDVDVSNLGCGLNGALYFVSMDADGGMSKYSGNKAGAKYGTGYCDSQCPRDLKFINGEANVENWQSSTNDANAGTGKYGSCCSEMDVWEANNMAAAFTPHPCTVIGQSRCEGDSCGGTYSTDRYAGICDPDGCDFNSYRQGNKTFYGKGMTVDTTKKITVVTQFLKNSAGELSEIKRFYVQNGKVIPNAESTIPGVEGNSITQDWCDRQKAAFGDVTDFQDKGGMVQMGKALAGPMVLVMSIWDDHAVNMLWLDSTWPIDGAGKPGAERGACPTTSGVPAEVEAEAPNSNVIFSNIRFGPIGSTVSGLPDGGSGNPNPPVSSSTPVPSSSTTSSGSSGPTGGTGVAKHYEQCGGIGFTGPTQCESPYTCTKLNDWYSQCL

SEQ ID NO: 311 - protein, 509 aa, Myceliophthora thermophila
QNACTLTAENHPSLTWSKCTSGGSCTSVQGSITIDANWRWTHRTDSATNCYEGNKWDTSYCSDGPSCASKCCIDGADYSSTYGITTSGNSLNLKFVTKGQYSTNIGSRTYLMESDTKYQMFQLLGNEFTFDVDVSNLGCGLNGALYFVSMDADGGMSKYSGNKAGAKYGTGYCDSQCPRDLKFINGEANVENWQSSTNDANAGTGKYGSCCSEMDVWEANNMAAAFTPHPCTVIGQSRCEGDSCGGTYSTDRYAGICDPDGCDFNSYRQGNKTFYGKGMTVDTTKKITVVTQFLKNSAGELSEIKRFYVQNGKVIPNSEVTIPGVEGNSITQDWCDRQKAAFGDVTDFQDKGGMVQMGKALAGPMVLVMSIWDDHAVNMLWLDSTWPIDGAGKPGAERGACPTTSGVPAEVEAEAPNSNVIFSNIRFGPIGSTVSGLPDGGSGNPNPPVSSSTPVPSSSTTSSGSSGPTGGTGVAKHYEQCGGIGFTGPTQCESPYTCTKLNDWYSQCL

SEQ ID NO: 312 - protein, 509 aa, Myceliophthora thermophila
QNACTLTAENHPSLTWSKCTSGGSCTSVQGSITIDANWRWTHRTDSATNCYEGNKWDTSYCSDGPSCASKCCIDGADYSSTYGITTSGNSLNLKFVTKGQYSTNIGSRTYLMESDTKYQMFQLLGNEFTFDVDVSNLGCGLNGALYFVSMDADGGMSKYSGNKAGAKYGTGYCDSQCPRDLKFINGEANVENWQSSTNDANAGTGKYGSCCSEMDVWEANNMAAAFTPHPCTVIGQSRCEGDSCGGTYSTDRYAGICDPDGCDFNSYRQGNKTFYGKGMTVDTTKKITVVTQFLKNSAGELSEIKRFYVQNGKVIPNSESTIPGVEGDSITQDWCDRQKAAFGDVTDFQDKGGMVQMGKALAGPMVLVMSIWDDHAVNMLWLDSTWPIDGAGKPGAERGACPTTSGVPAEVEAEAPNSNVIFSNIRFGPIGSTVSGLPDGGSGNPNPPVSSSTPVPSSSTTSSGSSGPTGGTGVAKHYEQCGGIGFTGPTQCESPYTCTKLNDWYSQCL

SEQ ID NO: 313 - protein, 509 aa, Myceliophthora thermophila
QNACTLTAENHPSLTWSKCTSGGSCTSVQGSITIDANWRWTHRTDSATNCYEGNKWDTSYCSDGPSCASKCCIDGADYSSTYGITTSGNSLNLKFVTKGQYSTNIGSRTYLMESDTKYQMFQLLGNEFTFDVDVSNLGCGLNGALYFVSMDADGGMSKYSGNKAGAKYGTGYCDSQCPRDLKFINGEANVENWQSSTNDANAGTGKYGSCCSEMDVWEANNMAAAFTPHPCTVIGQSRCEGDSCGGTYSTDRYAGICDPDGCDFNSYRQGNKTFYGKGMTVDTTKKITVVTQFLKNSAGELSEIKRFYVQNGKVIPNSESTIPGVEGNKITQDWCDRQKAAFGDVTDFQDKGGMVQMGKALAGPMVLVMSIWDDHAVNMLWLDSTWPIDGAGKPGAERGACPTTSGVPAEVEAEAPNSNVIFSNIRFGPIGSTVSGLPDGGSGNPNPPVSSSTPVPSSSTTSSGSSGPTGGTGVAKHYEQCGGIGFTGPTQCESPYTCTKLNDWYSQCL

SEQ ID NO: 314 - protein, 509 aa, Myceliophthora thermophila
QNACTLTAENHPSLTWSKCTSGGSCTSVQGSITIDANWRWTHRTDSATNCYEGNKWDTSYCSDGPSCASKCCIDGADYSSTYGITTSGNSLNLKFVTKGQYSTNIGSRTYLMESDTKYQMFQLLGNEFTFDVDVSNLGCGLNGALYFVSMDADGGMSKYSGNKAGAKYGTGYCDSQCPRDLKFINGEANVENWQSSTNDANAGTGKYGSCCSEMDVWEANNMAAAFTPHPCTVIGQSRCEGDSCGGTYSTDRYAGICDPDGCDFNSYRQGNKTFYGKGMTVDTTKKITVVTQFLKNSAGELSEIKRFYVQNGKVIPNSESTIPGVEGNSFTQDWCDRQKAAFGDVTDFQDKGGMVQMGKALAGPMVLVMSIWDDHAVNMLWLDSTWPIDGAGKPGAERGACPTTSGVPAEVEAEAPNSNVIFSNIRFGPIGSTVSGLPDGGSGNPNPPVSSSTPVPSSSTTSSGSSGPTGGTGVAKHYEQCGGIGFTGPTQCESPYTCTKLNDWYSQCL

SEQ ID NO: 315 - protein, 509 aa, Myceliophthora thermophila
QNACTLTAENHPSLTWSKCTSGGSCTSVQGSITIDANWRWTHRTDSATNCYEGNKWDTSYCSDGPSCASKCCIDGADYSSTYGITTSGNSLNLKFVTKGQYSTNIGSRTYLMESDTKYQMFQLLGNEFTFDVDVSNLGCGLNGALYFVSMDADGGMSKYSGNKAGAKYGTGYCDSQCPRDLKFINGEANVENWQSSTNDANAGTGKYGSCCSEMDVWEANNMAAAFTPHPCTVIGQSRCEGDSCGGTYSTDRYAGICDPDGCDFNSYRQGNKTFYGKGMTVDTTKKITVVTQFLKNSAGELSEIKRFYVQNGKVIPNSESTIPGVEGNSIYQDWCDRQKAAFGDVTDFQDKGGMVQMGKALAGPMVLVMSIWDDHAVNMLWLDSTWPIDGAGKPGAERGACPTTSGVPAEVEAEAPNSNVIFSNIRFGPIGSTVSGLPDGGSGNPNPPVSSSTPVPSSSTTSSGSSGPTGGTGVAKHYEQCGGIGFTGPTQCESPYTCTKLNDWYSQCL

SEQ ID NO: 316 - protein, 509 aa, Myceliophthora thermophila
QNACTLTAENHPSLTWSKCTSGGSCTSVQGSITIDANWRWTHRTDSATNCYEGNKWDTSYCSDGPSCASKCCIDGADYSSTYGITTSGNSLNLKFVTKGQYSTNIGSRTYLMESDTKYQMFQLLGNEFTFDVDVSNLGCGLNGALYFVSMDADGGMSKYSGNKAGAKYGTGYCDSQCPRDLKFINGEANVENWQSSTNDANAGTGKYGSCCSEMDVWEANNMAAAFTPHPCTVIGQSRCEGDSCGGTYSTDRYAGICDPDGCDFNSYRQGNKTFYGKGMTVDTTKKITVVTQFLKNSAGELSEIKRFYVQNGKVIPNSESTIPGVEGNSITQDWCIRQKAAFGDVTDFQDKGGMVQMGKALAGPMVLVMSIWDDHAVNMLWLDSTWPIDGAGKPGAERGACPTTSGVPAEVEAEAPNSNVIFSNIRFGPIGSTVSGLPDGGSGNPNPPVSSSTPVPSSSTTSSGSSGPTGGTGVAKHYEQCGGIGFTGPTQCESPYTCTKLNDWYSQCL

SEQ ID NO: 317 - protein, 509 aa, Myceliophthora thermophila
QNACTLTAENHPSLTWSKCTSGGSCTSVQGSITIDANWRWTHRTDSATNCYEGNKWDTSYCSDGPSCASKCCIDGADYSSTYGITTSGNSLNLKFVTKGQYSTNIGSRTYLMESDTKYQMFQLLGNEFTFDVDVSNLGCGLNGALYFVSMDADGGMSKYSGNKAGAKYGTGYCDSQCPRDLKFINGEANVENWQSSTNDANAGTGKYGSCCSEMDVWEANNMAAAFTPHPCTVIGQSRCEGDSCGGTYSTDRYAGICDPDGCDFNSYRQGNKTFYGKGMTVDTTKKITVVTQFLKNSAGELSEIKRFYVQNGKVIPNSESTIPGVEGNSITQDWCDRQKAAFDDVTDFQDKGGMVQMGKALAGPMVLVMSIWDDHAVNMLWLDSTWPIDGAGKPGAERGACPTTSGVPAEVEAEAPNSNVIFSNIRFGPIGSTVSGLPDGGSGNPNPPVSSSTPVPSSSTTSSGSSGPTGGTGVAKHYEQCGGIGFTGPTQCESPYTCTKLNDWYSQCL

SEQ ID NO: 318 - protein, 509 aa, Myceliophthora thermophila
QNACTLTAENHPSLTWSKCTSGGSCTSVQGSITIDANWRWTHRTDSATNCYEGNKWDTSYCSDGPSCASKCCIDGADYSSTYGITTSGNSLNLKFVTKGQYSTNIGSRTYLMESDTKYQMFQLLGNEFTFDVDVSNLGCGLNGALYFVSMDADGGMSKYSGNKAGAKYGTGYCDSQCPRDLKFINGEANVENWQSSTNDANAGTGKYGSCCSEMDVWEANNMAAAFTPHPCTVIGQSRCEGDSCGGTYSTDRYAGICDPDGCDFNSYRQGNKTFYGKGMTVDTTKKITVVTQFLKNSAGELSEIKRFYVQNGKVIPNSESTIPGVEGNSITQDWCDRQKAAFGDVTDLQDKGGMVQMGKALAGPMVLVMSIWDDHAVNMLWLDSTWPIDGAGKPGAERGACPTTSGVPAEVEAEAPNSNVIFSNIRFGPIGSTVSGLPDGGSGNPNPPVSSSTPVPSSSTTSSGSSGPTGGTGVAKHYEQCGGIGFTGPTQCESPYTCTKLNDWYSQCL

SEQ ID NO: 319 - protein, 509 aa, Myceliophthora thermophila
QNACTLTAENHPSLTWSKCTSGGSCTSVQGSITIDANWRWTHRTDSATNCYEGNKWDTSYCSDGPSCASKCCIDGADYSSTYGITTSGNSLNLKFVTKGQYSTNIGSRTYLMESDTKYQMFQLLGNEFTFDVDVSNLGCGLNGALYFVSMDADGGMSKYSGNKAGAKYGTGYCDSQCPRDLKFINGEANVENWQSSTNDANAGTGKYGSCCSEMDVWEANNMAAAFTPHPCTVIGQSRCEGDSCGGTYSTDRYAGICDPDGCDFNSYRQGNKTFYGKGMTVDTTKKITVVTQFLKNSAGELSEIKRFYVQNGKVIPNSESTIPGVEGNSITQDWCDRQKAAFGDVTDFQDKGGMVRMGKALAGPMVLVMSIWDDHAVNMLWLDSTWPIDGAGKPGAERGACPTTSGVPAEVEAEAPNSNVIFSNIRFGPIGSTVSGLPDGGSGNPNPPVSSSTPVPSSSTTSSGSSGPTGGTGVAKHYEQCGGIGFTGPTQCESPYTCTKLNDWYSQCL

SEQ ID NO: 320 - protein, 509 aa, Myceliophthora thermophila
QNACTLTAENHPSLTWSKCTSGGSCTSVQGSITIDANWRWTHRTDSATNCYEGNKWDTSYCSDGPSCASKCCIDGADYSSTYGITTSGNSLNLKFVTKGQYSTNIGSRTYLMESDTKYQMFQLLGNEFTFDVDVSNLGCGLNGALYFVSMDADGGMSKYSGNKAGAKYGTGYCDSQCPRDLKFINGEANVENWQSSTNDANAGTGKYGSCCSEMDVWEANNMAAAFTPHPCTVIGQSRCEGDSCGGTYSTDRYAGICDPDGCDFNSYRQGNKTFYGKGMTVDTTKKITVVTQFLKNSAGELSEIKRFYVQNGKVIPNSESTIPGVEGNSITQDWCDRQKAAFGDVTDFQDKGGMVQMMKALAGPMVLVMSIWDDHAVNMLWLDSTWPIDGAGKPGAERGACPTTSGVPAEVEAEAPNSNVIFSNIRFGPIGSTVSGLPDGGSGNPNPPVSSSTPVPSSSTTSSGSSGPTGGTGVAKHYEQCGGIGFTGPTQCESPYTCTKLNDWYSQCL

SEQ ID NO: 321 - protein, 509 aa, Myceliophthora thermophila
QNACTLTAENHPSLTWSKCTSGGSCTSVQGSITIDANWRWTHRTDSATNCYEGNKWDTSYCSDGPSCASKCCIDGADYSSTYGITTSGNSLNLKFVTKGQYSTNIGSRTYLMESDTKYQMFQLLGNEFTFDVDVSNLGCGLNGALYFVSMDADGGMSKYSGNKAGAKYGTGYCDSQCPRDLKFINGEANVENWQSSTNDANAGTGKYGSCCSEMDVWEANNMAAAFTPHPCTVIGQSRCEGDSCGGTYSTDRYAGICDPDGCDFNSYRQGNKTFYGKGMTVDTTKKITVVTQFLKNSAGELSEIKRFYVQNGKVIPNSESTIPGVEGNSITQDWCDRQKAAFGDVTDFQDKGGMVQMGKAAAGPMVLVMSIWDDHAVNMLWLDSTWPIDGAGKPGAERGACPTTSGVPAEVEAEAPNSNVIFSNIRFGPIGSTVSGLPDGGSGNPNPPVSSSTPVPSSSTTSSGSSGPTGGTGVAKHYEQCGGIGFTGPTQCESPYTCTKLNDWYSQCL

SEQ ID NO: 322 - protein, 509 aa, Myceliophthora thermophila
QNACTLTAENHPSLTWSKCTSGGSCTSVQGSITIDANWRWTHRTDSATNCYEGNKWDTSYCSDGPSCASKCCIDGADYSSTYGITTSGNSLNLKFVTKGQYSTNIGSRTYLMESDTKYQMFQLLGNEFTFDVDVSNLGCGLNGALYFVSMDADGGMSKYSGNKAGAKYGTGYCDSQCPRDLKFINGEANVENWQSSTNDANAGTGKYGSCCSEMDVWEANNMAAAFTPHPCTVIGQSRCEGDSCGGTYSTDRYAGICDPDGCDFNSYRQGNKTFYGKGMTVDTTKKITVVTQFLKNSAGELSEIKRFYVQNGKVIPNSESTIPGVEGNSITQDWCDRQKAAFGDVTDFQDKGGMVQMGKAIAGPMVLVMSIWDDHAVNMLWLDSTWPIDGAGKPGAERGACPTTSGVPAEVEAEAPNSNVIFSNIRFGPIGSTVSGLPDGGSGNPNPPVSSSTPVPSSSTTSSGSSGPTGGTGVAKHYEQCGGIGFTGPTQCESPYTCTKLNDWYSQCL

SEQ ID NO: 323 - protein, 509 aa, Myceliophthora thermophila
QNACTLTAENHPSLTWSKCTSGGSCTSVQGSITIDANWRWTHRTDSATNCYEGNKWDTSYCSDGPSCASKCCIDGADYSSTYGITTSGNSLNLKFVTKGQYSTNIGSRTYLMESDTKYQMFQLLGNEFTFDVDVSNLGCGLNGALYFVSMDADGGMSKYSGNKAGAKYGTGYCDSQCPRDLKFINGEANVENWQSSTNDANAGTGKYGSCCSEMDVWEANNMAAAFTPHPCTVIGQSRCEGDSCGGTYSTDRYAGICDPDGCDFNSYRQGNKTFYGKGMTVDTTKKITVVTQFLKNSAGELSEIKRFYVQNGKVIPNSESTIPGVEGNSITQDWCDRQKAAFGDVTDFQDKGGMVQMGKALASPMVLVMSIWDDHAVNMLWLDSTWPIDGAGKPGAERGACPTTSGVPAEVEAEAPNSNVIFSNIRFGPIGSTVSGLPDGGSGNPNPPVSSSTPVPSSSTTSSGSSGPTGGTGVAKHYEQCGGIGFTGPTQCESPYTCTKLNDWYSQCL

SEQ ID NO: 324 - protein, 509 aa, Myceliophthora thermophila
QNACTLTAENHPSLTWSKCTSGGSCTSVQGSITIDANWRWTHRTDSATNCYEGNKWDTSYCSDGPSCASKCCIDGADYSSTYGITTSGNSLNLKFVTKGQYSTNIGSRTYLMESDTKYQMFQLLGNEFTFDVDVSNLGCGLNGALYFVSMDADGGMSKYSGNKAGAKYGTGYCDSQCPRDLKFINGEANVENWQSSTNDANAGTGKYGSCCSEMDVWEANNMAAAFTPHPCTVIGQSRCEGDSCGGTYSTDRYAGICDPDGCDFNSYRQGNKTFYGKGMTVDTTKKITVVTQFLKNSAGELSEIKRFYVQNGKVIPNSESTIPGVEGNSITQDWCDRQKAAFGDVTDFQDKGGMVQMGKALAGPMVLVVSIWDDHAVNMLWLDSTWPIDGAGKPGAERGACPTTSGVPAEVEAEAPNSNVIFSNIRFGPIGSTVSGLPDGGSGNPNPPVSSSTPVPSSSTTSSGSSGPTGGTGVAKHYEQCGGIGFTGPTQCESPYTCTKLNDWYSQCL

SEQ ID NO: 325 - protein, 509 aa, Myceliophthora thermophila
QNACTLTAENHPSLTWSKCTSGGSCTSVQGSITIDANWRWTHRTDSATNCYEGNKWDTSYCSDGPSCASKCCIDGADYSSTYGITTSGNSLNLKFVTKGQYSTNIGSRTYLMESDTKYQMFQLLGNEFTFDVDVSNLGCGLNGALYFVSMDADGGMSKYSGNKAGAKYGTGYCDSQCPRDLKFINGEANVENWQSSTNDANAGTGKYGSCCSEMDVWEANNMAAAFTPHPCTVIGQSRCEGDSCGGTYSTDRYAGICDPDGCDFNSYRQGNKTFYGKGMTVDTTKKITVVTQFLKNSAGELSEIKRFYVQNGKVIPNSESTIPGVEGNSITQDWCDRQKAAFGDVTDFQDKGGMVQMGKALAGPMVLVMSIWADHAVNMLWLDSTWPIDGAGKPGAERGACPTTSGVPAEVEAEAPNSNVIFSNIRFGPIGSTVSGLPDGGSGNPNPPVSSSTPVPSSSTTSSGSSGPTGGTGVAKHYEQCGGIGFTGPTQCESPYTCTKLNDWYSQCL

SEQ ID NO: 326 - protein, 509 aa, Myceliophthora thermophila
QNACTLTAENHPSLTWSKCTSGGSCTSVQGSITIDANWRWTHRTDSATNCYEGNKWDTSYCSDGPSCASKCCIDGADYSSTYGITTSGNSLNLKFVTKGQYSTNIGSRTYLMESDTKYQMFQLLGNEFTFDVDVSNLGCGLNGALYFVSMDADGGMSKYSGNKAGAKYGTGYCDSQCPRDLKFINGEANVENWQSSTNDANAGTGKYGSCCSEMDVWEANNMAAAFTPHPCTVIGQSRCEGDSCGGTYSTDRYAGICDPDGCDFNSYRQGNKTFYGKGMTVDTTKKITVVTQFLKNSAGELSEIKRFYVQNGKVIPNSESTIPGVEGNSITQDWCDRQKAAFGDVTDFQDKGGMVQMGKALAGPMVLVMSIWGDHAVNMLWLDSTWPIDGAGKPGAERGACPTTSGVPAEVEAEAPNSNVIFSNIRFGPIGSTVSGLPDGGSGNPNPPVSSSTPVPSSSTTSSGSSGPTGGTGVAKHYEQCGGIGFTGPTQCESPYTCTKLNDWYSQCL

SEQ ID NO: 327 - protein, 509 aa, Myceliophthora thermophila
QNACTLTAENHPSLTWSKCTSGGSCTSVQGSITIDANWRWTHRTDSATNCYEGNKWDTSYCSDGPSCASKCCIDGADYSSTYGITTSGNSLNLKFVTKGQYSTNIGSRTYLMESDTKYQMFQLLGNEFTFDVDVSNLGCGLNGALYFVSMDADGGMSKYSGNKAGAKYGTGYCDSQCPRDLKFINGEANVENWQSSTNDANAGTGKYGSCCSEMDVWEANNMAAAFTPHPCTVIGQSRCEGDSCGGTYSTDRYAGICDPDGCDFNSYRQGNKTFYGKGMTVDTTKKITVVTQFLKNSAGELSEIKRFYVQNGKVIPNSESTIPGVEGNSITQDWCDRQKAAFGDVTDFQDKGGMVQMGKALAGPMVLVMSIWDDHATNMLWLDSTWPIDGAGKPGAERGACPTTSGVPAEVEAEAPNSNVIFSNIRFGPIGSTVSGLPDGGSGNPNPPVSSSTPVPSSSTTSSGSSGPTGGTGVAKHYEQCGGIGFTGPTQCESPYTCTKLNDWYSQCL

SEQ ID NO: 328 - protein, 509 aa, Myceliophthora thermophila
QNACTLTAENHPSLTWSKCTSGGSCTSVQGSITIDANWRWTHRTDSATNCYEGNKWDTSYCSDGPSCASKCCIDGADYSSTYGITTSGNSLNLKFVTKGQYSTNIGSRTYLMESDTKYQMFQLLGNEFTFDVDVSNLGCGLNGALYFVSMDADGGMSKYSGNKAGAKYGTGYCDSQCPRDLKFINGEANVENWQSSTNDANAGTGKYGSCCSEMDVWEANNMAAAFTPHPCTVIGQSRCEGDSCGGTYSTDRYAGICDPDGCDFNSYRQGNKTFYGKGMTVDTTKKITVVTQFLKNSAGELSEIKRFYVQNGKVIPNSESTIPGVEGNSITQDWCDRQKAAFGDVTDFQDKGGMVQMGKALAGPMVLVMSIWDDHAVYMLWLDSTWPIDGAGKPGAERGACPTTSGVPAEVEAEAPNSNVIFSNIRFGPIGSTVSGLPDGGSGNPNPPVSSSTPVPSSSTTSSGSSGPTGGTGVAKHYEQCGGIGFTGPTQCESPYTCTKLNDWYSQCL

SEQ ID NO: 329 - protein, 509 aa, Myceliophthora thermophila
QNACTLTAENHPSLTWSKCTSGGSCTSVQGSITIDANWRWTHRTDSATNCYEGNKWDTSYCSDGPSCASKCCIDGADYSSTYGITTSGNSLNLKFVTKGQYSTNIGSRTYLMESDTKYQMFQLLGNEFTFDVDVSNLGCGLNGALYFVSMDADGGMSKYSGNKAGAKYGTGYCDSQCPRDLKFINGEANVENWQSSTNDANAGTGKYGSCCSEMDVWEANNMAAAFTPHPCTVIGQSRCEGDSCGGTYSTDRYAGICDPDGCDFNSYRQGNKTFYGKGMTVDTTKKITVVTQFLKNSAGELSEIKRFYVQNGKVIPNSESTIPGVEGNSITQDWCDRQKAAFGDVTDFQDKGGMVQMGKALAGPMVLVMSIWDDHAVNVLWLDSTWPIDGAGKPGAERGACPTTSGVPAEVEAEAPNSNVIFSNIRFGPIGSTVSGLPDGGSGNPNPPVSSSTPVPSSSTTSSGSSGPTGGTGVAKHYEQCGGIGFTGPTQCESPYTCTKLNDWYSQCL

SEQ ID NO: 330 - protein, 509 aa, Myceliophthora thermophila
QNACTLTAENHPSLTWSKCTSGGSCTSVQGSITIDANWRWTHRTDSATNCYEGNKWDTSYCSDGPSCASKCCIDGADYSSTYGITTSGNSLNLKFVTKGQYSTNIGSRTYLMESDTKYQMFQLLGNEFTFDVDVSNLGCGLNGALYFVSMDADGGMSKYSGNKAGAKYGTGYCDSQCPRDLKFINGEANVENWQSSTNDANAGTGKYGSCCSEMDVWEANNMAAAFTPHPCTVIGQSRCEGDSCGGTYSTDRYAGICDPDGCDFNSYRQGNKTFYGKGMTVDTTKKITVVTQFLKNSAGELSEIKRFYVQNGKVIPNSESTIPGVEGNSITQDWCDRQKAAFGDVTDFQDKGGMVQMGKALAGPMVLVMSIWDDHAVNMAWLDSTWPIDGAGKPGAERGACPTTSGVPAEVEAEAPNSNVIFSNIRFGPIGSTVSGLPDGGSGNPNPPVSSSTPVPSSSTTSSGSSGPTGGTGVAKHYEQCGGIGFTGPTQCESPYTCTKLNDWYSQCL

SEQ ID NO: 331 - protein, 509 aa, Myceliophthora thermophila
QNACTLTAENHPSLTWSKCTSGGSCTSVQGSITIDANWRWTHRTDSATNCYEGNKWDTSYCSDGPSCASKCCIDGADYSSTYGITTSGNSLNLKFVTKGQYSTNIGSRTYLMESDTKYQMFQLLGNEFTFDVDVSNLGCGLNGALYFVSMDADGGMSKYSGNKAGAKYGTGYCDSQCPRDLKFINGEANVENWQSSTNDANAGTGKYGSCCSEMDVWEANNMAAAFTPHPCTVIGQSRCEGDSCGGTYSTDRYAGICDPDGCDFNSYRQGNKTFYGKGMTVDTTKKITVVTQFLKNSAGELSEIKRFYVQNGKVIPNSESTIPGVEGNSITQDWCDRQKAAFGDVTDFQDKGGMVQMGKALAGPMVLVMSIWDDHAVNMLWLESTWPIDGAGKPGAERGACPTTSGVPAEVEAEAPNSNVIFSNIRFGPIGSTVSGLPDGGSGNPNPPVSSSTPVPSSSTTSSGSSGPTGGTGVAKHYEQCGGIGFTGPTQCESPYTCTKLNDWYSQCL

SEQ ID NO: 332 - protein, 509 aa, Myceliophthora thermophila
QNACTLTAENHPSLTWSKCTSGGSCTSVQGSITIDANWRWTHRTDSATNCYEGNKWDTSYCSDGPSCASKCCIDGADYSSTYGITTSGNSLNLKFVTKGQYSTNIGSRTYLMESDTKYQMFQLLGNEFTFDVDVSNLGCGLNGALYFVSMDADGGMSKYSGNKAGAKYGTGYCDSQCPRDLKFINGEANVENWQSSTNDANAGTGKYGSCCSEMDVWEANNMAAAFTPHPCTVIGQSRCEGDSCGGTYSTDRYAGICDPDGCDFNSYRQGNKTFYGKGMTVDTTKKITVVTQFLKNSAGELSEIKRFYVQNGKVIPNSESTIPGVEGNSITQDWCDRQKAAFGDVTDFQDKGGMVQMGKALAGPMVLVMSIWDDHAVNMLWLDCTWPIDGAGKPGAERGACPTTSGVPAEVEAEAPNSNVIFSNIRFGPIGSTVSGLPDGGSGNPNPPVSSSTPVPSSSTTSSGSSGPTGGTGVAKHYEQCGGIGFTGPTQCESPYTCTKLNDWYSQCL

SEQ ID NO: 333 - protein, 509 aa, Myceliophthora thermophila
QNACTLTAENHPSLTWSKCTSGGSCTSVQGSITIDANWRWTHRTDSATNCYEGNKWDTSYCSDGPSCASKCCIDGADYSSTYGITTSGNSLNLKFVTKGQYSTNIGSRTYLMESDTKYQMFQLLGNEFTFDVDVSNLGCGLNGALYFVSMDADGGMSKYSGNKAGAKYGTGYCDSQCPRDLKFINGEANVENWQSSTNDANAGTGKYGSCCSEMDVWEANNMAAAFTPHPCTVIGQSRCEGDSCGGTYSTDRYAGICDPDGCDFNSYRQGNKTFYGKGMTVDTTKKITVVTQFLKNSAGELSEIKRFYVQNGKVIPNSESTIPGVEGNSITQDWCDRQKAAFGDVTDFQDKGGMVQMGKALAGPMVLVMSIWDDHAVNMLWLDETWPIDGAGKPGAERGACPTTSGVPAEVEAEAPNSNVIFSNIRFGPIGSTVSGLPDGGSGNPNPPVSSSTPVPSSSTTSSGSSGPTGGTGVAKHYEQCGGIGFTGPTQCESPYTCTKLNDWYSQCL

SEQ ID NO: 334 - protein, 509 aa, Myceliophthora thermophila
QNACTLTAENHPSLTWSKCTSGGSCTSVQGSITIDANWRWTHRTDSATNCYEGNKWDTSYCSDGPSCASKCCIDGADYSSTYGITTSGNSLNLKFVTKGQYSTNIGSRTYLMESDTKYQMFQLLGNEFTFDVDVSNLGCGLNGALYFVSMDADGGMSKYSGNKAGAKYGTGYCDSQCPRDLKFINGEANVENWQSSTNDANAGTGKYGSCCSEMDVWEANNMAAAFTPHPCTVIGQSRCEGDSCGGTYSTDRYAGICDPDGCDFNSYRQGNKTFYGKGMTVDTTKKITVVTQFLKNSAGELSEIKRFYVQNGKVIPNSESTIPGVEGNSITQDWCDRQKAAFGDVTDFQDKGGMVQMGKALAGPMVLVMSIWDDHAVNMLWLDSTWIIDGAGKPGAERGACPTTSGVPAEVEAEAPNSNVIFSNIRFGPIGSTVSGLPDGGSGNPNPPVSSSTPVPSSSTTSSGSSGPTGGTGVAKHYEQCGGIGFTGPTQCESPYTCTKLNDWYSQCL

SEQ ID NO: 335 - protein, 509 aa, Myceliophthora thermophila
QNACTLTAENHPSLTWSKCTSGGSCTSVQGSITIDANWRWTHRTDSATNCYEGNKWDTSYCSDGPSCASKCCIDGADYSSTYGITTSGNSLNLKFVTKGQYSTNIGSRTYLMESDTKYQMFQLLGNEFTFDVDVSNLGCGLNGALYFVSMDADGGMSKYSGNKAGAKYGTGYCDSQCPRDLKFINGEANVENWQSSTNDANAGTGKYGSCCSEMDVWEANNMAAAFTPHPCTVIGQSRCEGDSCGGTYSTDRYAGICDPDGCDFNSYRQGNKTFYGKGMTVDTTKKITVVTQFLKNSAGELSEIKRFYVQNGKVIPNSESTIPGVEGNSITQDWCDRQKAAFGDVTDFQDKGGMVQMGKALAGPMVLVMSIWDDHAVNMLWLDSTWLIDGAGKPGAERGACPTTSGVPAEVEAEAPNSNVIFSNIRFGPIGSTVSGLPDGGSGNPNPPVSSSTPVPSSSTTSSGSSGPTGGTGVAKHYEQCGGIGFTGPTQCESPYTCTKLNDWYSQCL

SEQ ID NO: 336 - protein, 509 aa, Myceliophthora thermophila
QNACTLTAENHPSLTWSKCTSGGSCTSVQGSITIDANWRWTHRTDSATNCYEGNKWDTSYCSDGPSCASKCCIDGADYSSTYGITTSGNSLNLKFVTKGQYSTNIGSRTYLMESDTKYQMFQLLGNEFTFDVDVSNLGCGLNGALYFVSMDADGGMSKYSGNKAGAKYGTGYCDSQCPRDLKFINGEANVENWQSSTNDANAGTGKYGSCCSEMDVWEANNMAAAFTPHPCTVIGQSRCEGDSCGGTYSTDRYAGICDPDGCDFNSYRQGNKTFYGKGMTVDTTKKITVVTQFLKNSAGELSEIKRFYVQNGKVIPNSESTIPGVEGNSITQDWCDRQKAAFGDVTDFQDKGGMVQMGKALAGPMVLVMSIWDDHAVNMLWLDSTWQIDGAGKPGAERGACPTTSGVPAEVEAEAPNSNVIFSNIRFGPIGSTVSGLPDGGSGNPNPPVSSSTPVPSSSTTSSGSSGPTGGTGVAKHYEQCGGIGFTGPTQCESPYTCTKLNDWYSQCL

SEQ ID NO: 337 - protein, 509 aa, Myceliophthora thermophila
QNACTLTAENHPSLTWSKCTSGGSCTSVQGSITIDANWRWTHRTDSATNCYEGNKWDTSYCSDGPSCASKCCIDGADYSSTYGITTSGNSLNLKFVTKGQYSTNIGSRTYLMESDTKYQMFQLLGNEFTFDVDVSNLGCGLNGALYFVSMDADGGMSKYSGNKAGAKYGTGYCDSQCPRDLKFINGEANVENWQSSTNDANAGTGKYGSCCSEMDVWEANNMAAAFTPHPCTVIGQSRCEGDSCGGTYSTDRYAGICDPDGCDFNSYRQGNKTFYGKGMTVDTTKKITVVTQFLKNSAGELSEIKRFYVQNGKVIPNSESTIPGVEGNSITQDWCDRQKAAFGDVTDFQDKGGMVQMGKALAGPMVLVMSIWDDHAVNMLWLDSTWPADGAGKPGAERGACPTTSGVPAEVEAEAPNSNVIFSNIRFGPIGSTVSGLPDGGSGNPNPPVSSSTPVPSSSTTSSGSSGPTGGTGVAKHYEQCGGIGFTGPTQCESPYTCTKLNDWYSQCL

SEQ ID NO: 338 - protein, 509 aa, Myceliophthora thermophila
QNACTLTAENHPSLTWSKCTSGGSCTSVQGSITIDANWRWTHRTDSATNCYEGNKWDTSYCSDGPSCASKCCIDGADYSSTYGITTSGNSLNLKFVTKGQYSTNIGSRTYLMESDTKYQMFQLLGNEFTFDVDVSNLGCGLNGALYFVSMDADGGMSKYSGNKAGAKYGTGYCDSQCPRDLKFINGEANVENWQSSTNDANAGTGKYGSCCSEMDVWEANNMAAAFTPHPCTVIGQSRCEGDSCGGTYSTDRYAGICDPDGCDFNSYRQGNKTFYGKGMTVDTTKKITVVTQFLKNSAGELSEIKRFYVQNGKVIPNSESTIPGVEGNSITQDWCDRQKAAFGDVTDFQDKGGMVQMGKALAGPMVLVMSIWDDHAVNMLWLDSTWPSDGAGKPGAERGACPTTSGVPAEVEAEAPNSNVIFSNIRFGPIGSTVSGLPDGGSGNPNPPVSSSTPVPSSSTTSSGSSGPTGGTGVAKHYEQCGGIGFTGPTQCESPYTCTKLNDWYSQCL

SEQ ID NO: 339 - protein, 509 aa, Myceliophthora thermophila
QNACTLTAENHPSLTWSKCTSGGSCTSVQGSITIDANWRWTHRTDSATNCYEGNKWDTSYCSDGPSCASKCCIDGADYSSTYGITTSGNSLNLKFVTKGQYSTNIGSRTYLMESDTKYQMFQLLGNEFTFDVDVSNLGCGLNGALYFVSMDADGGMSKYSGNKAGAKYGTGYCDSQCPRDLKFINGEANVENWQSSTNDANAGTGKYGSCCSEMDVWEANNMAAAFTPHPCTVIGQSRCEGDSCGGTYSTDRYAGICDPDGCDFNSYRQGNKTFYGKGMTVDTTKKITVVTQFLKNSAGELSEIKRFYVQNGKVIPNSESTIPGVEGNSITQDWCDRQKAAFGDVTDFQDKGGMVQMGKALAGPMVLVMSIWDDHAVNMLWLDSTWPIDIAGKPGAERGACPTTSGVPAEVEAEAPNSNVIFSNIRFGPIGSTVSGLPDGGSGNPNPPVSSSTPVPSSSTTSSGSSGPTGGTGVAKHYEQCGGIGFTGPTQCESPYTCTKLNDWYSQCL

SEQ ID NO: 340 - protein, 509 aa, Myceliophthora thermophila
QNACTLTAENHPSLTWSKCTSGGSCTSVQGSITIDANWRWTHRTDSATNCYEGNKWDTSYCSDGPSCASKCCIDGADYSSTYGITTSGNSLNLKFVTKGQYSTNIGSRTYLMESDTKYQMFQLLGNEFTFDVDVSNLGCGLNGALYFVSMDADGGMSKYSGNKAGAKYGTGYCDSQCPRDLKFINGEANVENWQSSTNDANAGTGKYGSCCSEMDVWEANNMAAAFTPHPCTVIGQSRCEGDSCGGTYSTDRYAGICDPDGCDFNSYRQGNKTFYGKGMTVDTTKKITVVTQFLKNSAGELSEIKRFYVQNGKVIPNSESTIPGVEGNSITQDWCDRQKAAFGDVTDFQDKGGMVQMGKALAGPMVLVMSIWDDHAVNMLWLDSTWPIDLAGKPGAERGACPTTSGVPAEVEAEAPNSNVIFSNIRFGPIGSTVSGLPDGGSGNPNPPVSSSTPVPSSSTTSSGSSGPTGGTGVAKHYEQCGGIGFTGPTQCESPYTCTKLNDWYSQCL

SEQ ID NO: 341 - protein, 509 aa, Myceliophthora thermophila
QNACTLTAENHPSLTWSKCTSGGSCTSVQGSITIDANWRWTHRTDSATNCYEGNKWDTSYCSDGPSCASKCCIDGADYSSTYGITTSGNSLNLKFVTKGQYSTNIGSRTYLMESDTKYQMFQLLGNEFTFDVDVSNLGCGLNGALYFVSMDADGGMSKYSGNKAGAKYGTGYCDSQCPRDLKFINGEANVENWQSSTNDANAGTGKYGSCCSEMDVWEANNMAAAFTPHPCTVIGQSRCEGDSCGGTYSTDRYAGICDPDGCDFNSYRQGNKTFYGKGMTVDTTKKITVVTQFLKNSAGELSEIKRFYVQNGKVIPNSESTIPGVEGNSITQDWCDRQKAAFGDVTDFQDKGGMVQMGKALAGPMVLVMSIWDDHAVNMLWLDSTWPIDGAGKAGAERGACPTTSGVPAEVEAEAPNSNVIFSNIRFGPIGSTVSGLPDGGSGNPNPPVSSSTPVPSSSTTSSGSSGPTGGTGVAKHYEQCGGIGFTGPTQCESPYTCTKLNDWYSQCL

SEQ ID NO: 342 - protein, 509 aa, Myceliophthora thermophila
QNACTLTAENHPSLTWSKCTSGGSCTSVQGSITIDANWRWTHRTDSATNCYEGNKWDTSYCSDGPSCASKCCIDGADYSSTYGITTSGNSLNLKFVTKGQYSTNIGSRTYLMESDTKYQMFQLLGNEFTFDVDVSNLGCGLNGALYFVSMDADGGMSKYSGNKAGAKYGTGYCDSQCPRDLKFINGEANVENWQSSTNDANAGTGKYGSCCSEMDVWEANNMAAAFTPHPCTVIGQSRCEGDSCGGTYSTDRYAGICDPDGCDFNSYRQGNKTFYGKGMTVDTTKKITVVTQFLKNSAGELSEIKRFYVQNGKVIPNSESTIPGVEGNSITQDWCDRQKAAFGDVTDFQDKGGMVQMGKALAGPMVLVMSIWDDHAVNMLWLDSTWPIDGAGKCGAERGACPTTSGVPAEVEAEAPNSNVIFSNIRFGPIGSTVSGLPDGGSGNPNPPVSSSTPVPSSSTTSSGSSGPTGGTGVAKHYEQCGGIGFTGPTQCESPYTCTKLNDWYSQCL

SEQ ID NO: 343 - protein, 509 aa, Myceliophthora thermophila
QNACTLTAENHPSLTWSKCTSGGSCTSVQGSITIDANWRWTHRTDSATNCYEGNKWDTSYCSDGPSCASKCCIDGADYSSTYGITTSGNSLNLKFVTKGQYSTNIGSRTYLMESDTKYQMFQLLGNEFTFDVDVSNLGCGLNGALYFVSMDADGGMSKYSGNKAGAKYGTGYCDSQCPRDLKFINGEANVENWQSSTNDANAGTGKYGSCCSEMDVWEANNMAAAFTPHPCTVIGQSRCEGDSCGGTYSTDRYAGICDPDGCDFNSYRQGNKTFYGKGMTVDTTKKITVVTQFLKNSAGELSEIKRFYVQNGKVIPNSESTIPGVEGNSITQDWCDRQKAAFGDVTDFQDKGGMVQMGKALAGPMVLVMSIWDDHAVNMLWLDSTWPIDGAGKGGAERGACPTTSGVPAEVEAEAPNSNVIFSNIRFGPIGSTVSGLPDGGSGNPNPPVSSSTPVPSSSTTSSGSSGPTGGTGVAKHYEQCGGIGFTGPTQCESPYTCTKLNDWYSQCL

SEQ ID NO: 344 - protein, 509 aa, Myceliophthora thermophila
QNACTLTAENHPSLTWSKCTSGGSCTSVQGSITIDANWRWTHRTDSATNCYEGNKWDTSYCSDGPSCASKCCIDGADYSSTYGITTSGNSLNLKFVTKGQYSTNIGSRTYLMESDTKYQMFQLLGNEFTFDVDVSNLGCGLNGALYFVSMDADGGMSKYSGNKAGAKYGTGYCDSQCPRDLKFINGEANVENWQSSTNDANAGTGKYGSCCSEMDVWEANNMAAAFTPHPCTVIGQSRCEGDSCGGTYSTDRYAGICDPDGCDFNSYRQGNKTFYGKGMTVDTTKKITVVTQFLKNSAGELSEIKRFYVQNGKVIPNSESTIPGVEGNSITQDWCDRQKAAFGDVTDFQDKGGMVQMGKALAGPMVLVMSIWDDHAVNMLWLDSTWPIDGAGKKGAERGACPTTSGVPAEVEAEAPNSNVIFSNIRFGPIGSTVSGLPDGGSGNPNPPVSSSTPVPSSSTTSSGSSGPTGGTGVAKHYEQCGGIGFTGPTQCESPYTCTKLNDWYSQCL

SEQ ID NO: 345 - protein, 509 aa, Myceliophthora thermophila
QNACTLTAENHPSLTWSKCTSGGSCTSVQGSITIDANWRWTHRTDSATNCYEGNKWDTSYCSDGPSCASKCCIDGADYSSTYGITTSGNSLNLKFVTKGQYSTNIGSRTYLMESDTKYQMFQLLGNEFTFDVDVSNLGCGLNGALYFVSMDADGGMSKYSGNKAGAKYGTGYCDSQCPRDLKFINGEANVENWQSSTNDANAGTGKYGSCCSEMDVWEANNMAAAFTPHPCTVIGQSRCEGDSCGGTYSTDRYAGICDPDGCDFNSYRQGNKTFYGKGMTVDTTKKITVVTQFLKNSAGELSEIKRFYVQNGKVIPNSESTIPGVEGNSITQDWCDRQKAAFGDVTDFQDKGGMVQMGKALAGPMVLVMSIWDDHAVNMLWLDSTWPIDGAGKLGAERGACPTTSGVPAEVEAEAPNSNVIFSNIRFGPIGSTVSGLPDGGSGNPNPPVSSSTPVPSSSTTSSGSSGPTGGTGVAKHYEQCGGIGFTGPTQCESPYTCTKLNDWYSQCL

SEQ ID NO: 346 - protein, 509 aa, Myceliophthora thermophila
QNACTLTAENHPSLTWSKCTSGGSCTSVQGSITIDANWRWTHRTDSATNCYEGNKWDTSYCSDGPSCASKCCIDGADYSSTYGITTSGNSLNLKFVTKGQYSTNIGSRTYLMESDTKYQMFQLLGNEFTFDVDVSNLGCGLNGALYFVSMDADGGMSKYSGNKAGAKYGTGYCDSQCPRDLKFINGEANVENWQSSTNDANAGTGKYGSCCSEMDVWEANNMAAAFTPHPCTVIGQSRCEGDSCGGTYSTDRYAGICDPDGCDFNSYRQGNKTFYGKGMTVDTTKKITVVTQFLKNSAGELSEIKRFYVQNGKVIPNSESTIPGVEGNSITQDWCDRQKAAFGDVTDFQDKGGMVQMGKALAGPMVLVMSIWDDHAVNMLWLDSTWPIDGAGKVGAERGACPTTSGVPAEVEAEAPNSNVIFSNIRFGPIGSTVSGLPDGGSGNPNPPVSSSTPVPSSSTTSSGSSGPTGGTGVAKHYEQCGGIGFTGPTQCESPYTCTKLNDWYSQCL

SEQ ID NO: 347 - protein, 509 aa, Myceliophthora thermophila
QNACTLTAENHPSLTWSKCTSGGSCTSVQGSITIDANWRWTHRTDSATNCYEGNKWDTSYCSDGPSCASKCCIDGADYSSTYGITTSGNSLNLKFVTKGQYSTNIGSRTYLMESDTKYQMFQLLGNEFTFDVDVSNLGCGLNGALYFVSMDADGGMSKYSGNKAGAKYGTGYCDSQCPRDLKFINGEANVENWQSSTNDANAGTGKYGSCCSEMDVWEANNMAAAFTPHPCTVIGQSRCEGDSCGGTYSTDRYAGICDPDGCDFNSYRQGNKTFYGKGMTVDTTKKITVVTQFLKNSAGELSEIKRFYVQNGKVIPNSESTIPGVEGNSITQDWCDRQKAAFGDVTDFQDKGGMVQMGKALAGPMVLVMSIWDDHAVNMLWLDSTWPIDGAGKWGAERGACPTTSGVPAEVEAEAPNSNVIFSNIRFGPIGSTVSGLPDGGSGNPNPPVSSSTPVPSSSTTSSGSSGPTGGTGVAKHYEQCGGIGFTGPTQCESPYTCTKLNDWYSQCL

SEQ ID NO: 348 - protein, 509 aa, Myceliophthora thermophila
QNACTLTAENHPSLTWSKCTSGGSCTSVQGSITIDANWRWTHRTDSATNCYEGNKWDTSYCSDGPSCASKCCIDGADYSSTYGITTSGNSLNLKFVTKGQYSTNIGSRTYLMESDTKYQMFQLLGNEFTFDVDVSNLGCGLNGALYFVSMDADGGMSKYSGNKAGAKYGTGYCDSQCPRDLKFINGEANVENWQSSTNDANAGTGKYGSCCSEMDVWEANNMAAAFTPHPCTVIGQSRCEGDSCGGTYSTDRYAGICDPDGCDFNSYRQGNKTFYGKGMTVDTTKKITVVTQFLKNSAGELSEIKRFYVQNGKVIPNSESTIPGVEGNSITQDWCDRQKAAFGDVTDFQDKGGMVQMGKALAGPMVLVMSIWDDHAVNMLWLDSTWPIDGAGKPGAARGACPTTSGVPAEVEAEAPNSNVIFSNIRFGPIGSTVSGLPDGGSGNPNPPVSSSTPVPSSSTTSSGSSGPTGGTGVAKHYEQCGGIGFTGPTQCESPYTCTKLNDWYSQCL

SEQ ID NO: 349 - protein, 509 aa, Myceliophthora thermophila
QNACTLTAENHPSLTWSKCTSGGSCTSVQGSITIDANWRWTHRTDSATNCYEGNKWDTSYCSDGPSCASKCCIDGADYSSTYGITTSGNSLNLKFVTKGQYSTNIGSRTYLMESDTKYQMFQLLGNEFTFDVDVSNLGCGLNGALYFVSMDADGGMSKYSGNKAGAKYGTGYCDSQCPRDLKFINGEANVENWQSSTNDANAGTGKYGSCCSEMDVWEANNMAAAFTPHPCTVIGQSRCEGDSCGGTYSTDRYAGICDPDGCDFNSYRQGNKTFYGKGMTVDTTKKITVVTQFLKNSAGELSEIKRFYVQNGKVIPNSESTIPGVEGNSITQDWCDRQKAAFGDVTDFQDKGGMVQMGKALAGPMVLVMSIWDDHAVNMLWLDSTWPIDGAGKPGAERGACPTGSGVPAEVEAEAPNSNVIFSNIRFGPIGSTVSGLPDGGSGNPNPPVSSSTPVPSSSTTSSGSSGPTGGTGVAKHYEQCGGIGFTGPTQCESPYTCTKLNDWYSQCL

SEQ ID NO: 350 - protein, 509 aa, Myceliophthora thermophila
QNACTLTAENHPSLTWSKCTSGGSCTSVQGSITIDANWRWTHRTDSATNCYEGNKWDTSYCSDGPSCASKCCIDGADYSSTYGITTSGNSLNLKFVTKGQYSTNIGSRTYLMESDTKYQMFQLLGNEFTFDVDVSNLGCGLNGALYFVSMDADGGMSKYSGNKAGAKYGTGYCDSQCPRDLKFINGEANVENWQSSTNDANAGTGKYGSCCSEMDVWEANNMAAAFTPHPCTVIGQSRCEGDSCGGTYSTDRYAGICDPDGCDFNSYRQGNKTFYGKGMTVDTTKKITVVTQFLKNSAGELSEIKRFYVQNGKVIPNSESTIPGVEGNSITQDWCDRQKAAFGDVTDFQDKGGMVQMGKALAGPMVLVMSIWDDHAVNMLWLDSTWPIDGAGKPGAERGACPTTSGVPAPVEAEAPNSNVIFSNIRFGPIGSTVSGLPDGGSGNPNPPVSSSTPVPSSSTTSSGSSGPTGGTGVAKHYEQCGGIGFTGPTQCESPYTCTKLNDWYSQCL

SEQ ID NO: 351 - protein, 509 aa, Myceliophthora thermophila
QNACTLTAENHPSLTWSKCTSGGSCTSVQGSITIDANWRWTHRTDSATNCYEGNKWDTSYCSDGPSCASKCCIDGADYSSTYGITTSGNSLNLKFVTKGQYSTNIGSRTYLMESDTKYQMFQLLGNEFTFDVDVSNLGCGLNGALYFVSMDADGGMSKYSGNKAGAKYGTGYCDSQCPRDLKFINGEANVENWQSSTNDANAGTGKYGSCCSEMDVWEANNMAAAFTPHPCTVIGQSRCEGDSCGGTYSTDRYAGICDPDGCDFNSYRQGNKTFYGKGMTVDTTKKITVVTQFLKNSAGELSEIKRFYVQNGKVIPNSESTIPGVEGNSITQDWCDRQKAAFGDVTDFQDKGGMVQMGKALAGPMVLVMSIWDDHAVNMLWLDSTWPIDGAGKPGAERGACPTTSGVPAEIEAEAPNSNVIFSNIRFGPIGSTVSGLPDGGSGNPNPPVSSSTPVPSSSTTSSGSSGPTGGTGVAKHYEQCGGIGFTGPTQCESPYTCTKLNDWYSQCL

SEQ ID NO: 352 - protein, 509 aa, Myceliophthora thermophila
QNACTLTAENHPSLTWSKCTSGGSCTSVQGSITIDANWRWTHRTDSATNCYEGNKWDTSYCSDGPSCASKCCIDGADYSSTYGITTSGNSLNLKFVTKGQYSTNIGSRTYLMESDTKYQMFQLLGNEFTFDVDVSNLGCGLNGALYFVSMDADGGMSKYSGNKAGAKYGTGYCDSQCPRDLKFINGEANVENWQSSTNDANAGTGKYGSCCSEMDVWEANNMAAAFTPHPCTVIGQSRCEGDSCGGTYSTDRYAGICDPDGCDFNSYRQGNKTFYGKGMTVDTTKKITVVTQFLKNSAGELSEIKRFYVQNGKVIPNSESTIPGVEGNSITQDWCDRQKAAFGDVTDFQDKGGMVQMGKALAGPMVLVMSIWDDHAVNMLWLDSTWPIDGAGKPGAERGACPTTSGVPAEVEAEAPNSNVIFFNIRFGPIGSTVSGLPDGGSGNPNPPVSSSTPVPSSSTTSSGSSGPTGGTGVAKHYEQCGGIGFTGPTQCESPYTCTKLNDWYSQCL

SEQ ID NO: 353 - protein, 509 aa, Myceliophthora thermophila
QNACTLTAENHPSLTWSKCTSGGSCTSVQGSITIDANWRWTHRTDSATNCYEGNKWDTSYCSDGPSCASKCCIDGADYSSTYGITTSGNSLNLKFVTKGQYSTNIGSRTYLMESDTKYQMFQLLGNEFTFDVDVSNLGCGLNGALYFVSMDADGGMSKYSGNKAGAKYGTGYCDSQCPRDLKFINGEANVENWQSSTNDANAGTGKYGSCCSEMDVWEANNMAAAFTPHPCTVIGQSRCEGDSCGGTYSTDRYAGICDPDGCDFNSYRQGNKTFYGKGMTVDTTKKITVVTQFLKNSAGELSEIKRFYVQNGKVIPNSESTIPGVEGNSITQDWCDRQKAAFGDVTDFQDKGGMVQMGKALAGPMVLVMSIWDDHAVNMLWLDSTWPIDGAGKPGAERGACPTTSGVPAEVEAEAPNSNVIFSDIRFGPIGSTVSGLPDGGSGNPNPPVSSSTPVPSSSTTSSGSSGPTGGTGVAKHYEQCGGIGFTGPTQCESPYTCTKLNDWYSQCL

SEQ ID NO: 354 - protein, 509 aa, Myceliophthora thermophila
QNACTLTAENHPSLTWSKCTSGGSCTSVQGSITIDANWRWTHRTDSATNCYEGNKWDTSYCSDGPSCASKCCIDGADYSSTYGITTSGNSLNLKFVTKGQYSTNIGSRTYLMESDTKYQMFQLLGNEFTFDVDVSNLGCGLNGALYFVSMDADGGMSKYSGNKAGAKYGTGYCDSQCPRDLKFINGEANVENWQSSTNDANAGTGKYGSCCSEMDVWEANNMAAAFTPHPCTVIGQSRCEGDSCGGTYSTDRYAGICDPDGCDFNSYRQGNKTFYGKGMTVDTTKKITVVTQFLKNSAGELSEIKRFYVQNGKVIPNSESTIPGVEGNSITQDWCDRQKAAFGDVTDFQDKGGMVQMGKALAGPMVLVMSIWDDHAVNMLWLDSTWPIDGAGKPGAERGACPTTSGVPAEVEAEAPNSNVIFSNIRYGPIGSTVSGLPDGGSGNPNPPVSSSTPVPSSSTTSSGSSGPTGGTGVAKHYEQCGGIGFTGPTQCESPYTCTKLNDWYSQCL

SEQ ID NO: 355 - protein, 509 aa, Myceliophthora thermophila
QNACTLTAENHPSLTWSKCTSGGSCTSVQGSITIDANWRWTHRTDSATNCYEGNKWDTSYCSDGPSCASKCCIDGADYSSTYGITTSGNSLNLKFVTKGQYSTNIGSRTYLMESDTKYQMFQLLGNEFTFDVDVSNLGCGLNGALYFVSMDADGGMSKYSGNKAGAKYGTGYCDSQCPRDLKFINGEANVENWQSSTNDANAGTGKYGSCCSEMDVWEANNMAAAFTPHPCTVIGQSRCEGDSCGGTYSTDRYAGICDPDGCDFNSYRQGNKTFYGKGMTVDTTKKITVVTQFLKNSAGELSEIKRFYVQNGKVIPNSESTIPGVEGNSITQDWCDRQKAAFGDVTDFQDKGGMVQMGKALAGPMVLVMSIWDDHAVNMLWLDSTWPIDGAGKPGAERGACPTTSGVPAEVEAEAPNSNVIFSNIRFGPIGSTDSGLPDGGSGNPNPPVSSSTPVPSSSTTSSGSSGPTGGTGVAKHYEQCGGIGFTGPTQCESPYTCTKLNDWYSQCL

SEQ ID NO: 356 - protein, 509 aa, Myceliophthora thermophila
QNACTLTAENHPSLTWSKCTSGGSCTSVQGSITIDANWRWTHRTDSATNCYEGNKWDTSYCSDGPSCASKCCIDGADYSSTYGITTSGNSLNLKFVTKGQYSTNIGSRTYLMESDTKYQMFQLLGNEFTFDVDVSNLGCGLNGALYFVSMDADGGMSKYSGNKAGAKYGTGYCDSQCPRDLKFINGEANVENWQSSTNDANAGTGKYGSCCSEMDVWEANNMAAAFTPHPCTVIGQSRCEGDSCGGTYSTDRYAGICDPDGCDFNSYRQGNKTFYGKGMTVDTTKKITVVTQFLKNSAGELSEIKRFYVQNGKVIPNSESTIPGVEGNSITQDWCDRQKAAFGDVTDFQDKGGMVQMGKALAGPMVLVMSIWDDHAVNMLWLDSTWPIDGAGKPGAERGACPTTSGVPAEVEAEAPNSNVIFSNIRFGPIGSTVRGLPDGGSGNPNPPVSSSTPVPSSSTTSSGSSGPTGGTGVAKHYEQCGGIGFTGPTQCESPYTCTKLNDWYSQCL

SEQ ID NO: 357 - protein, 509 aa, Myceliophthora thermophila
QNACTLTAENHPSLTWSKCTSGGSCTSVQGSITIDANWRWTHRTDSATNCYEGNKWDTSYCSDGPSCASKCCIDGADYSSTYGITTSGNSLNLKFVTKGQYSTNIGSRTYLMESDTKYQMFQLLGNEFTFDVDVSNLGCGLNGALYFVSMDADGGMSKYSGNKAGAKYGTGYCDSQCPRDLKFINGEANVENWQSSTNDANAGTGKYGSCCSEMDVWEANNMAAAFTPHPCTVIGQSRCEGDSCGGTYSTDRYAGICDPDGCDFNSYRQGNKTFYGKGMTVDTTKKITVVTQFLKNSAGELSEIKRFYVQNGKVIPNSESTIPGVEGNSITQDWCDRQKAAFGDVTDFQDKGGMVQMGKALAGPMVLVMSIWDDHAVNMLWLDSTWPIDGAGKPGAERGACPTTSGVPAEVEAEAPNSNVIFSNIRFGPIGSTVSGLPDGSSGNPNPPVSSSTPVPSSSTTSSGSSGPTGGTGVAKHYEQCGGIGFTGPTQCESPYTCTKLNDWYSQCL

SEQ ID NO: 358 - protein, 509 aa, Myceliophthora thermophila
QNACTLTAENHPSLTWSKCTSGGSCTSVQGSITIDANWRWTHRTDSATNCYEGNKWDTSYCSDGPSCASKCCIDGADYSSTYGITTSGNSLNLKFVTKGQYSTNIGSRTYLMESDTKYQMFQLLGNEFTFDVDVSNLGCGLNGALYFVSMDADGGMSKYSGNKAGAKYGTGYCDSQCPRDLKFINGEANVENWQSSTNDANAGTGKYGSCCSEMDVWEANNMAAAFTPHPCTVIGQSRCEGDSCGGTYSTDRYAGICDPDGCDFNSYRQGNKTFYGKGMTVDTTKKITVVTQFLKNSAGELSEIKRFYVQNGKVIPNSESTIPGVEGNSITQDWCDRQKAAFGDVTDFQDKGGMVQMGKALAGPMVLVMSIWDDHAVNMLWLDSTWPIDGAGKPGAERGACPTTSGVPAEVEAEAPNSNVIFSNIRFGPIGSTVSGLPDGGDGNPNPPVSSSTPVPSSSTTSSGSSGPTGGTGVAKHYEQCGGIGFTGPTQCESPYTCTKLNDWYSQCL

SEQ ID NO: 359 - protein, 509 aa, Myceliophthora thermophila
QNACTLTAENHPSLTWSKCTSGGSCTSVQGSITIDANWRWTHRTDSATNCYEGNKWDTSYCSDGPSCASKCCIDGADYSSTYGITTSGNSLNLKFVTKGQYSTNIGSRTYLMESDTKYQMFQLLGNEFTFDVDVSNLGCGLNGALYFVSMDADGGMSKYSGNKAGAKYGTGYCDSQCPRDLKFINGEANVENWQSSTNDANAGTGKYGSCCSEMDVWEANNMAAAFTPHPCTVIGQSRCEGDSCGGTYSTDRYAGICDPDGCDFNSYRQGNKTFYGKGMTVDTTKKITVVTQFLKNSAGELSEIKRFYVQNGKVIPNSESTIPGVEGNSITQDWCDRQKAAFGDVTDFQDKGGMVQMGKALAGPMVLVMSIWDDHAVNMLWLDSTWPIDGAGKPGAERGACPTTSGVPAEVEAEAPNSNVIFSNIRFGPIGSTVSGLPDGGSTNPNPPVSSSTPVPSSSTTSSGSSGPTGGTGVAKHYEQCGGIGFTGPTQCESPYTCTKLNDWYSQCL

SEQ ID NO: 360 - protein, 509 aa, Myceliophthora thermophila
QNACTLTAENHPSLTWSKCTSGGSCTSVQGSITIDANWRWTHRTDSATNCYEGNKWDTSYCSDGPSCASKCCIDGADYSSTYGITTSGNSLNLKFVTKGQYSTNIGSRTYLMESDTKYQMFQLLGNEFTFDVDVSNLGCGLNGALYFVSMDADGGMSKYSGNKAGAKYGTGYCDSQCPRDLKFINGEANVENWQSSTNDANAGTGKYGSCCSEMDVWEANNMAAAFTPHPCTVIGQSRCEGDSCGGTYSTDRYAGICDPDGCDFNSYRQGNKTFYGKGMTVDTTKKITVVTQFLKNSAGELSEIKRFYVQNGKVIPNSESTIPGVEGNSITQDWCDRQKAAFGDVTDFQDKGGMVQMGKALAGPMVLVMSIWDDHAVNMLWLDSTWPIDGAGKPGAERGACPTTSGVPAEVEAEAPNSNVIFSNIRFGPIGSTVSGLPDGGSGNPDPPVSSSTPVPSSSTTSSGSSGPTGGTGVAKHYEQCGGIGFTGPTQCESPYTCTKLNDWYSQCL

SEQ ID NO: 361 - protein, 509 aa, Myceliophthora thermophila
QNACTLTAENHPSLTWSKCTSGGSCTSVQGSITIDANWRWTHRTDSATNCYEGNKWDTSYCSDGPSCASKCCIDGADYSSTYGITTSGNSLNLKFVTKGQYSTNIGSRTYLMESDTKYQMFQLLGNEFTFDVDVSNLGCGLNGALYFVSMDADGGMSKYSGNKAGAKYGTGYCDSQCPRDLKFINGEANVENWQSSTNDANAGTGKYGSCCSEMDVWEANNMAAAFTPHPCTVIGQSRCEGDSCGGTYSTDRYAGICDPDGCDFNSYRQGNKTFYGKGMTVDTTKKITVVTQFLKNSAGELSEIKRFYVQNGKVIPNSESTIPGVEGNSITQDWCDRQKAAFGDVTDFQDKGGMVQMGKALAGPMVLVMSIWDDHAVNMLWLDSTWPIDGAGKPGAERGACPTTSGVPAEVEAEAPNSNVIFSNIRFGPIGSTVSGLPDGGSGNPNPPDSSSTPVPSSSTTSSGSSGPTGGTGVAKHYEQCGGIGFTGPTQCESPYTCTKLNDWYSQCL

SEQ ID NO: 362 - protein, 509 aa, Myceliophthora thermophila
QNACTLTAENHPSLTWSKCTSGGSCTSVQGSITIDANWRWTHRTDSATNCYEGNKWDTSYCSDGPSCASKCCIDGADYSSTYGITTSGNSLNLKFVTKGQYSTNIGSRTYLMESDTKYQMFQLLGNEFTFDVDVSNLGCGLNGALYFVSMDADGGMSKYSGNKAGAKYGTGYCDSQCPRDLKFINGEANVENWQSSTNDANAGTGKYGSCCSEMDVWEANNMAAAFTPHPCTVIGQSRCEGDSCGGTYSTDRYAGICDPDGCDFNSYRQGNKTFYGKGMTVDTTKKITVVTQFLKNSAGELSEIKRFYVQNGKVIPNSESTIPGVEGNSITQDWCDRQKAAFGDVTDFQDKGGMVQMGKALAGPMVLVMSIWDDHAVNMLWLDSTWPIDGAGKPGAERGACPTTSGVPAEVEAEAPNSNVIFSNIRFGPIGSTVSGLPDGGSGNPNPPVISSTPVPSSSTTSSGSSGPTGGTGVAKHYEQCGGIGFTGPTQCESPYTCTKLNDWYSQCL

SEQ ID NO: 363 - protein, 509 aa, Myceliophthora thermophila
QNACTLTAENHPSLTWSKCTSGGSCTSVQGSITIDANWRWTHRTDSATNCYEGNKWDTSYCSDGPSCASKCCIDGADYSSTYGITTSGNSLNLKFVTKGQYSTNIGSRTYLMESDTKYQMFQLLGNEFTFDVDVSNLGCGLNGALYFVSMDADGGMSKYSGNKAGAKYGTGYCDSQCPRDLKFINGEANVENWQSSTNDANAGTGKYGSCCSEMDVWEANNMAAAFTPHPCTVIGQSRCEGDSCGGTYSTDRYAGICDPDGCDFNSYRQGNKTFYGKGMTVDTTKKITVVTQFLKNSAGELSEIKRFYVQNGKVIPNSESTIPGVEGNSITQDWCDRQKAAFGDVTDFQDKGGMVQMGKALAGPMVLVMSIWDDHAVNMLWLDSTWPIDGAGKPGAERGACPTTSGVPAEVEAEAPNSNVIFSNIRFGPIGSTVSGLPDGGSGNPNPPVSASTPVPSSSTTSSGSSGPTGGTGVAKHYEQCGGIGFTGPTQCESPYTCTKLNDWYSQCL

SEQ ID NO: 364 - protein, 509 aa, Myceliophthora thermophila
QNACTLTAENHPSLTWSKCTSGGSCTSVQGSITIDANWRWTHRTDSATNCYEGNKWDTSYCSDGPSCASKCCIDGADYSSTYGITTSGNSLNLKFVTKGQYSTNIGSRTYLMESDTKYQMFQLLGNEFTFDVDVSNLGCGLNGALYFVSMDADGGMSKYSGNKAGAKYGTGYCDSQCPRDLKFINGEANVENWQSSTNDANAGTGKYGSCCSEMDVWEANNMAAAFTPHPCTVIGQSRCEGDSCGGTYSTDRYAGICDPDGCDFNSYRQGNKTFYGKGMTVDTTKKITVVTQFLKNSAGELSEIKRFYVQNGKVIPNSESTIPGVEGNSITQDWCDRQKAAFGDVTDFQDKGGMVQMGKALAGPMVLVMSIWDDHAVNMLWLDSTWPIDGAGKPGAERGACPTTSGVPAEVEAEAPNSNVIFSNIRFGPIGSTVSGLPDGGSGNPNPPVSSSTPSPSSSTTSSGSSGPTGGTGVAKHYEQCGGIGFTGPTQCESPYTCTKLNDWYSQCL

SEQ ID NO: 365 - protein, 509 aa, Myceliophthora thermophila
QNACTLTAENHPSLTWSKCTSGGSCTSVQGSITIDANWRWTHRTDSATNCYEGNKWDTSYCSDGPSCASKCCIDGADYSSTYGITTSGNSLNLKFVTKGQYSTNIGSRTYLMESDTKYQMFQLLGNEFTFDVDVSNLGCGLNGALYFVSMDADGGMSKYSGNKAGAKYGTGYCDSQCPRDLKFINGEANVENWQSSTNDANAGTGKYGSCCSEMDVWEANNMAAAFTPHPCTVIGQSRCEGDSCGGTYSTDRYAGICDPDGCDFNSYRQGNKTFYGKGMTVDTTKKITVVTQFLKNSAGELSEIKRFYVQNGKVIPNSESTIPGVEGNSITQDWCDRQKAAFGDVTDFQDKGGMVQMGKALAGPMVLVMSIWDDHAVNMLWLDSTWPIDGAGKPGAERGACPTTSGVPAEVEAEAPNSNVIFSNIRFGPIGSTVSGLPDGGSGNPNPPVSSSTPVPSISTTSSGSSGPTGGTGVAKHYEQCGGIGFTGPTQCESPYTCTKLNDWYSQCL

SEQ ID NO: 366 - protein, 509 aa, Myceliophthora thermophila
QNACTLTAENHPSLTWSKCTSGGSCTSVQGSITIDANWRWTHRTDSATNCYEGNKWDTSYCSDGPSCASKCCIDGADYSSTYGITTSGNSLNLKFVTKGQYSTNIGSRTYLMESDTKYQMFQLLGNEFTFDVDVSNLGCGLNGALYFVSMDADGGMSKYSGNKAGAKYGTGYCDSQCPRDLKFINGEANVENWQSSTNDANAGTGKYGSCCSEMDVWEANNMAAAFTPHPCTVIGQSRCEGDSCGGTYSTDRYAGICDPDGCDFNSYRQGNKTFYGKGMTVDTTKKITVVTQFLKNSAGELSEIKRFYVQNGKVIPNSESTIPGVEGNSITQDWCDRQKAAFGDVTDFQDKGGMVQMGKALAGPMVLVMSIWDDHAVNMLWLDSTWPIDGAGKPGAERGACPTTSGVPAEVEAEAPNSNVIFSNIRFGPIGSTVSGLPDGGSGNPNPPVSSSTPVPSSITTSSGSSGPTGGTGVAKHYEQCGGIGFTGPTQCESPYTCTKLNDWYSQCL

SEQ ID NO: 367 - protein, 509 aa, Myceliophthora thermophila
QNACTLTAENHPSLTWSKCTSGGSCTSVQGSITIDANWRWTHRTDSATNCYEGNKWDTSYCSDGPSCASKCCIDGADYSSTYGITTSGNSLNLKFVTKGQYSTNIGSRTYLMESDTKYQMFQLLGNEFTFDVDVSNLGCGLNGALYFVSMDADGGMSKYSGNKAGAKYGTGYCDSQCPRDLKFINGEANVENWQSSTNDANAGTGKYGSCCSEMDVWEANNMAAAFTPHPCTVIGQSRCEGDSCGGTYSTDRYAGICDPDGCDFNSYRQGNKTFYGKGMTVDTTKKITVVTQFLKNSAGELSEIKRFYVQNGKVIPNSESTIPGVEGNSITQDWCDRQKAAFGDVTDFQDKGGMVQMGKALAGPMVLVMSIWDDHAVNMLWLDSTWPIDGAGKPGAERGACPTTSGVPAEVEAEAPNSNVIFSNIRFGPIGSTVSGLPDGGSGNPNPPVSSSTPVPSSSQTSSGSSGPTGGTGVAKHYEQCGGIGFTGPTQCESPYTCTKLNDWYSQCL

SEQ ID NO: 368 - protein, 509 aa, Myceliophthora thermophila
QNACTLTAENHPSLTWSKCTSGGSCTSVQGSITIDANWRWTHRTDSATNCYEGNKWDTSYCSDGPSCASKCCIDGADYSSTYGITTSGNSLNLKFVTKGQYSTNIGSRTYLMESDTKYQMFQLLGNEFTFDVDVSNLGCGLNGALYFVSMDADGGMSKYSGNKAGAKYGTGYCDSQCPRDLKFINGEANVENWQSSTNDANAGTGKYGSCCSEMDVWEANNMAAAFTPHPCTVIGQSRCEGDSCGGTYSTDRYAGICDPDGCDFNSYRQGNKTFYGKGMTVDTTKKITVVTQFLKNSAGELSEIKRFYVQNGKVIPNSESTIPGVEGNSITQDWCDRQKAAFGDVTDFQDKGGMVQMGKALAGPMVLVMSIWDDHAVNMLWLDSTWPIDGAGKPGAERGACPTTSGVPAEVEAEAPNSNVIFSNIRFGPIGSTVSGLPDGGSGNPNPPVSSSTPVPSSSTTSSGSLGPTGGTGVAKHYEQCGGIGFTGPTQCESPYTCTKLNDWYSQCL

SEQ ID NO: 369 - protein, 509 aa, Myceliophthora thermophila
QNACTLTAENHPSLTWSKCTSGGSCTSVQGSITIDANWRWTHRTDSATNCYEGNKWDTSYCSDGPSCASKCCIDGADYSSTYGITTSGNSLNLKFVTKGQYSTNIGSRTYLMESDTKYQMFQLLGNEFTFDVDVSNLGCGLNGALYFVSMDADGGMSKYSGNKAGAKYGTGYCDSQCPRDLKFINGEANVENWQSSTNDANAGTGKYGSCCSEMDVWEANNMAAAFTPHPCTVIGQSRCEGDSCGGTYSTDRYAGICDPDGCDFNSYRQGNKTFYGKGMTVDTTKKITVVTQFLKNSAGELSEIKRFYVQNGKVIPNSESTIPGVEGNSITQDWCDRQKAAFGDVTDFQDKGGMVQMGKALAGPMVLVMSIWDDHAVNMLWLDSTWPIDGAGKPGAERGACPTTSGVPAEVEAEAPNSNVIFSNIRFGPIGSTVSGLPDGGSGNPNPPVSSSTPVPSSSTTSSGSSGPTGGTGVKKHYEQCGGIGFTGPTQCESPYTCTKLNDWYSQCL

SEQ ID NO: 370 - protein, 509 aa, Myceliophthora thermophila
QNACTLTAENHPSLTWSKCTSGGSCTSVQGSITIDANWRWTHRTDSATNCYEGNKWDTSYCSDGPSCASKCCIDGADYSSTYGITTSGNSLNLKFVTKGQYSTNIGSRTYLMESDTKYQMFQLLGNEFTFDVDVSNLGCGLNGALYFVSMDADGGMSKYSGNKAGAKYGTGYCDSQCPRDLKFINGEANVENWQSSTNDANAGTGKYGSCCSEMDVWEANNMAAAFTPHPCTVIGQSRCEGDSCGGTYSTDRYAGICDPDGCDFNSYRQGNKTFYGKGMTVDTTKKITVVTQFLKNSAGELSEIKRFYVQNGKVIPNSESTIPGVEGNSITQDWCDRQKAAFGDVTDFQDKGGMVQMGKALAGPMVLVMSIWDDHAVNMLWLDSTWPIDGAGKPGAERGACPTTSGVPAEVEAEAPNSNVIFSNIRFGPIGSTVSGLPDGGSGNPNPPVSSSTPVPSSSTTSSGSSGPTGGTGVLKHYEQCGGIGFTGPTQCESPYTCTKLNDWYSQCL

SEQ ID NO: 371 - protein, 509 aa, Myceliophthora thermophila
QNACTLTAENHPSLTWSKCTSGGSCTSVQGSITIDANWRWTHRTDSATNCYEGNKWDTSYCSDGPSCASKCCIDGADYSSTYGITTSGNSLNLKFVTKGQYSTNIGSRTYLMESDTKYQMFQLLGNEFTFDVDVSNLGCGLNGALYFVSMDADGGMSKYSGNKAGAKYGTGYCDSQCPRDLKFINGEANVENWQSSTNDANAGTGKYGSCCSEMDVWEANNMAAAFTPHPCTVIGQSRCEGDSCGGTYSTDRYAGICDPDGCDFNSYRQGNKTFYGKGMTVDTTKKITVVTQFLKNSAGELSEIKRFYVQNGKVIPNSESTIPGVEGNSITQDWCDRQKAAFGDVTDFQDKGGMVQMGKALAGPMVLVMSIWDDHAVNMLWLDSTWPIDGAGKPGAERGACPTTSGVPAEVEAEAPNSNVIFSNIRFGPIGSTVSGLPDGGSGNPNPPVSSSTPVPSSSTTSSGSSGPTGGTGVSKHYEQCGGIGFTGPTQCESPYTCTKLNDWYSQCL

SEQ ID NO: 372 - protein, 509 aa, Myceliophthora thermophila
QNACTLTAENHPSLTWSKCTSGGSCTSVQGSITIDANWRWTHRTDSATNCYEGNKWDTSYCSDGPSCASKCCIDGADYSSTYGITTSGNSLNLKFVTKGQYSTNIGSRTYLMESDTKYQMFQLLGNEFTFDVDVSNLGCGLNGALYFVSMDADGGMSKYSGNKAGAKYGTGYCDSQCPRDLKFINGEANVENWQSSTNDANAGTGKYGSCCSEMDVWEANNMAAAFTPHPCTVIGQSRCEGDSCGGTYSTDRYAGICDPDGCDFNSYRQGNKTFYGKGMTVDTTKKITVVTQFLKNSAGELSEIKRFYVQNGKVIPNSESTIPGVEGNSITQDWCDRQKAAFGDVTDFQDKGGMVQMGKALAGPMVLVMSIWDDHAVNMLWLDSTWPIDGAGKPGAERGACPTTSGVPAEVEAEAPNSNVIFSNIRFGPIGSTVSGLPDGGSGNPNPPVSSSTPVPSSSTTSSGSSGPTGGTGVAKHSEQCGGIGFTGPTQCESPYTCTKLNDWYSQCL

SEQ ID NO: 373 - protein, 509 aa, Myceliophthora thermophila
QNACTLTAENHPSLTWSKCTSGGSCTSVQGSITIDANWRWTHRTDSATNCYEGNKWDTSYCSDGPSCASKCCIDGADYSSTYGITTSGNSLNLKFVTKGQYSTNIGSRTYLMESDTKYQMFQLLGNEFTFDVDVSNLGCGLNGALYFVSMDADGGMSKYSGNKAGAKYGTGYCDSQCPRDLKFINGEANVENWQSSTNDANAGTGKYGSCCSEMDVWEANNMAAAFTPHPCTVIGQSRCEGDSCGGTYSTDRYAGICDPDGCDFNSYRQGNKTFYGKGMTVDTTKKITVVTQFLKNSAGELSEIKRFYVQNGKVIPNSESTIPGVEGNSITQDWCDRQKAAFGDVTDFQDKGGMVQMGKALAGPMVLVMSIWDDHAVNMLWLDSTWPIDGAGKPGAERGACPTTSGVPAEVEAEAPNSNVIFSNIRFGPIGSTVSGLPDGGSGNPNPPVSSSTPVPSSSTTSSGSSGPTGGTGVAKHYDQCGGIGFTGPTQCESPYTCTKLNDWYSQCL

SEQ ID NO: 374 - protein, 509 aa, Myceliophthora thermophila
QNACTLTAENHPSLTWSKCTSGGSCTSVQGSITIDANWRWTHRTDSATNCYEGNKWDTSYCSDGPSCASKCCIDGADYSSTYGITTSGNSLNLKFVTKGQYSTNIGSRTYLMESDTKYQMFQLLGNEFTFDVDVSNLGCGLNGALYFVSMDADGGMSKYSGNKAGAKYGTGYCDSQCPRDLKFINGEANVENWQSSTNDANAGTGKYGSCCSEMDVWEANNMAAAFTPHPCTVIGQSRCEGDSCGGTYSTDRYAGICDPDGCDFNSYRQGNKTFYGKGMTVDTTKKITVVTQFLKNSAGELSEIKRFYVQNGKVIPNSESTIPGVEGNSITQDWCDRQKAAFGDVTDFQDKGGMVQMGKALAGPMVLVMSIWDDHAVNMLWLDSTWPIDGAGKPGAERGACPTTSGVPAEVEAEAPNSNVIFSNIRFGPIGSTVSGLPDGGSGNPNPPVSSSTPVPSSSTTSSGSSGPTGGTGVAKHYEQCGSIGFTGPTQCESPYTCTKLNDWYSQCL

SEQ ID NO: 375 - protein, 509 aa, Myceliophthora thermophila
QNACTLTAENHPSLTWSKCTSGGSCTSVQGSITIDANWRWTHRTDSATNCYEGNKWDTSYCSDGPSCASKCCIDGADYSSTYGITTSGNSLNLKFVTKGQYSTNIGSRTYLMESDTKYQMFQLLGNEFTFDVDVSNLGCGLNGALYFVSMDADGGMSKYSGNKAGAKYGTGYCDSQCPRDLKFINGEANVENWQSSTNDANAGTGKYGSCCSEMDVWEANNMAAAFTPHPCTVIGQSRCEGDSCGGTYSTDRYAGICDPDGCDFNSYRQGNKTFYGKGMTVDTTKKITVVTQFLKNSAGELSEIKRFYVQNGKVIPNSESTIPGVEGNSITQDWCDRQKAAFGDVTDFQDKGGMVQMGKALAGPMVLVMSIWDDHAVNMLWLDSTWPIDGAGKPGAERGACPTTSGVPAEVEAEAPNSNVIFSNIRFGPIGSTVSGLPDGGSGNPNPPVSSSTPVPSSSTTSSGSSGPTGGTGVAKHYEQCGGIGFNGPTQCESPYTCTKLNDWYSQCL

SEQ ID NO: 376 - protein, 509 aa, Myceliophthora thermophila
QNACTLTAENHPSLTWSKCTSGGSCTSVQGSITIDANWRWTHRTDSATNCYEGNKWDTSYCSDGPSCASKCCIDGADYSSTYGITTSGNSLNLKFVTKGQYSTNIGSRTYLMESDTKYQMFQLLGNEFTFDVDVSNLGCGLNGALYFVSMDADGGMSKYSGNKAGAKYGTGYCDSQCPRDLKFINGEANVENWQSSTNDANAGTGKYGSCCSEMDVWEANNMAAAFTPHPCTVIGQSRCEGDSCGGTYSTDRYAGICDPDGCDFNSYRQGNKTFYGKGMTVDTTKKITVVTQFLKNSAGELSEIKRFYVQNGKVIPNSESTIPGVEGNSITQDWCDRQKAAFGDVTDFQDKGGMVQMGKALAGPMVLVMSIWDDHAVNMLWLDSTWPIDGAGKPGAERGACPTTSGVPAEVEAEAPNSNVIFSNIRFGPIGSTVSGLPDGGSGNPNPPVSSSTPVPSSSTTSSGSSGPTGGTGVAKHYEQCGGIGFTDPTQCESPYTCTKLNDWYSQCL

SEQ ID NO: 377 - protein, 509 aa, Myceliophthora thermophila
QNACTLTAENHPSLTWSKCTSGGSCTSVQGSITIDANWRWTHRTDSATNCYEGNKWDTSYCSDGPSCASKCCIDGADYSSTYGITTSGNSLNLKFVTKGQYSTNIGSRTYLMESDTKYQMFQLLGNEFTFDVDVSNLGCGLNGALYFVSMDADGGMSKYSGNKAGAKYGTGYCDSQCPRDLKFINGEANVENWQSSTNDANAGTGKYGSCCSEMDVWEANNMAAAFTPHPCTVIGQSRCEGDSCGGTYSTDRYAGICDPDGCDFNSYRQGNKTFYGKGMTVDTTKKITVVTQFLKNSAGELSEIKRFYVQNGKVIPNSESTIPGVEGNSITQDWCDRQKAAFGDVTDFQDKGGMVQMGKALAGPMVLVMSIWDDHAVNMLWLDSTWPIDGAGKPGAERGACPTTSGVPAEVEAEAPNSNVIFSNIRFGPIGSTVSGLPDGGSGNPNPPVSSSTPVPSSSTTSSGSSGPTGGTGVAKHYEQCGGIGFTGPTQCENPYTCTKLNDWYSQCL

SEQ ID NO: 378 - protein, 509 aa, Myceliophthora thermophila
QNACTLTAENHPSLTWSKCTSGGSCTSVQGSITIDANWRWTHRTDSATNCYEGNKWDTSYCSDGPSCASKCCIDGADYSSTYGITTSGNSLNLKFVTKGQYSTNIGSRTYLMESDTKYQMFQLLGNEFTFDVDVSNLGCGLNGALYFVSMDADGGMSKYSGNKAGAKYGTGYCDSQCPRDLKFINGEANVENWQSSTNDANAGTGKYGSCCSEMDVWEANNMAAAFTPHPCTVIGQSRCEGDSCGGTYSTDRYAGICDPDGCDFNSYRQGNKTFYGKGMTVDTTKKITVVTQFLKNSAGELSEIKRFYVQNGKVIPNSESTIPGVEGNSITQDWCDRQKAAFGDVTDFQDKGGMVQMGKALAGPMVLVMSIWDDHAVNMLWLDSTWPIDGAGKPGAERGACPTTSGVPAEVEAEAPNSNVIFSNIRFGPIGSTVSGLPDGGSGNPNPPVSSSTPVPSSSTTSSGSSGPTGGTGVAKHYEQCGGIGFTGPTQCESSYTCTKLNDWYSQCL

SEQ ID NO: 379 - protein, 509 aa, Myceliophthora thermophila
QNACTLTAENHPSLTWSKCTSGGSCTSVQGSITIDANWRWTHRTDSATNCYEGNKWDTSYCSDGPSCASKCCIDGADYSSTYGITTSGNSLNLKFVTKGQYSTNIGSRTYLMESDTKYQMFQLLGNEFTFDVDVSNLGCGLNGALYFVSMDADGGMSKYSGNKAGAKYGTGYCDSQCPRDLKFINGEANVENWQSSTNDANAGTGKYGSCCSEMDVWEANNMAAAFTPHPCTVIGQSRCEGDSCGGTYSTDRYAGICDPDGCDFNSYRQGNKTFYGKGMTVDTTKKITVVTQFLKNSAGELSEIKRFYVQNGKVIPNSESTIPGVEGNSITQDWCDRQKAAFGDVTDFQDKGGMVQMGKALAGPMVLVMSIWDDHAVNMLWLDSTWPIDGAGKPGAERGACPTTSGVPAEVEAEAPNSNVIFSNIRFGPIGSTVSGLPDGGSGNPNPPVSSSTPVPSSSTTSSGSSGPTGGTGVAKHYEQCGGIGFTGPTQCESVYTCTKLNDWYSQCL

SEQ ID NO: 380 - protein, 509 aa, Myceliophthora thermophila
QNACTLTAENHPSLTWSKCTSGGSCTSVQGSITIDANWRWTHRTDSATNCYEGNKWDTSYCSDGPSCASKCCIDGADYSSTYGITTSGNSLNLKFVTKGQYSTNIGSRTYLMESDTKYQMFQLLGNEFTFDVDVSNLGCGLNGALYFVSMDADGGMSKYSGNKAGAKYGTGYCDSQCPRDLKFINGEANVENWQSSTNDANAGTGKYGSCCSEMDVWEANNMAAAFTPHPCTVIGQSRCEGDSCGGTYSTDRYAGICDPDGCDFNSYRQGNKTFYGKGMTVDTTKKITVVTQFLKNSAGELSEIKRFYVQNGKVIPNSESTIPGVEGNSITQDWCDRQKAAFGDVTDFQDKGGMVQMGKALAGPMVLVMSIWDDHAVNMLWLDSTWPIDGAGKPGAERGACPTTSGVPAEVEAEAPNSNVIFSNIRFGPIGSTVSGLPDGGSGNPNPPVSSSTPVPSSSTTSSGSSGPTGGTGVAKHYEQCGGIGFTGPTQCESPYTRTKLNDWYSQCL

SEQ ID NO: 381 - protein, 509 aa, Myceliophthora thermophila
QNACTLTAENHPSLTWSKCTSGGSCTSVQGSITIDANWRWTHRTDSATNCYEGNKWDTSYCSDGPSCASKCCIDGADYSSTYGITTSGNSLNLKFVTKGQYSTNIGSRTYLMESDTKYQMFQLLGNEFTFDVDVSNLGCGLNGALYFVSMDADGGMSKYSGNKAGAKYGTGYCDSQCPRDLKFINGEANVENWQSSTNDANAGTGKYGSCCSEMDVWEANNMAAAFTPHPCTVIGQSRCEGDSCGGTYSTDRYAGICDPDGCDFNSYRQGNKTFYGKGMTVDTTKKITVVTQFLKNSAGELSEIKRFYVQNGKVIPNSESTIPGVEGNSITQDWCDRQKAAFGDVTDFQDKGGMVQMGKALAGPMVLVMSIWDDHAVNMLWLDSTWPIDGAGKPGAERGACPTTSGVPAEVEAEAPNSNVIFSNIRFGPIGSTVSGLPDGGSGNPNPPVSSSTPVPSSSTTSSGSSGPTGGTGVAKHYEQCGGIGFTGPTQCESPYTCTDLNDWYSQCL

SEQ ID NO: 382 - protein, 509 aa, Myceliophthora thermophila
QNACTLTAENHPSLTWSKCTSGGSCTSVQGSITIDANWRWTHRTDSATNCYEGNKWDTSYCSDGPSCASKCCIDGADYSSTYGITTSGNSLNLKFVTKGQYSTNIGSRTYLMESDTKYQMFQLLGNEFTFDVDVSNLGCGLNGALYFVSMDADGGMSKYSGNKAGAKYGTGYCDSQCPRDLKFINGEANVENWQSSTNDANAGTGKYGSCCSEMDVWEANNMAAAFTPHPCTVIGQSRCEGDSCGGTYSTDRYAGICDPDGCDFNSYRQGNKTFYGKGMTVDTTKKITVVTQFLKNSAGELSEIKRFYVQNGKVIPNSESTIPGVEGNSITQDWCDRQKAAFGDVTDFQDKGGMVQMGKALAGPMVLVMSIWDDHAVNMLWLDSTWPIDGAGKPGAERGACPTTSGVPAEVEAEAPNSNVIFSNIRFGPIGSTVSGLPDGGSGNPNPPVSSSTPVPSSSTTSSGSSGPTGGTGVAKHYEQCGGIGFTGPTQCESPYTCTKPNDWYSQCL

SEQ ID NO: 383 - protein, 509 aa, Myceliophthora thermophila
QNACTLTAENHPSLTWSKCTSGGSCTSVQGSITIDANWRWTHRTDSATNCYEGNKWDTSYCSDGPSCASKCCIDGADYSSTYGITTSGNSLNLKFVTKGQYSTNIGSRTYLMESDTKYQMFQLLGNEFTFDVDVSNLGCGLNGALYFVSMDADGGMSKYSGNKAGAKYGTGYCDSQCPRDLKFINGEANVENWQSSTNDANAGTGKYGSCCSEMDVWEANNMAAAFTPHPCTVIGQSRCEGDSCGGTYSTDRYAGICDPDGCDFNSYRQGNKTFYGKGMTVDTTKKITVVTQFLKNSAGELSEIKRFYVQNGKVIPNSESTIPGVEGNSITQDWCDRQKAAFGDVTDFQDKGGMVQMGKALAGPMVLVMSIWDDHAVNMLWLDSTWPIDGAGKPGAERGACPTTSGVPAEVEAEAPNSNVIFSNIRFGPIGSTVSGLPDGGSGNPNPPVSSSTPVPSSSTTSSGSSGPTGGTGVAKHYEQCGGIGFTGPTQCESPYTCTKQNDWYSQCL

SEQ ID NO: 384 - DNA, 1677 bp, Artificial
  Gene sequence with flanking sequences
catgtatcggaagttggccgtcatctcggccttcttggccacagctcgtgctcagtcggcctgcactctccaatcggagactcacccgcctctgacatggcagaaatgctcgtctggtggcacgtgcactcaacagacaggctccgtggtcatcgacgccaactggcgctggactcacgctacgaacagcagcacgaactgctacgatggcaacacttggagctcgaccctatgtcctgacaacgagacctgcgcgaagaactgctgtctggacggtgccgcctacgcgtccacgtacggagttaccacgagcggtaacagcctctccattggctttgtcacccagtctgcgcagaagaacgttggcgctcgcctttaccttatggcgagcgacacgacctaccaggaattcaccctgcttggcaacgagttctctttcgatgttgatgtttcgcagctgccgtaagtgacttaccatgaacccctgacgctatcttcttgttggctcccagctgactggccaattcaaggtgcggcttgaacggagctctctacttcgtgtccatggacgcggatggtggcgtgagcaagtatcccaccaacaccgctggcgccaagtacggcacggggtactgtgacagccagtgtccccgcgatctgaagttcatcaatggccaggccaacgttgagggctgggagccgtcatccaacaacgcgaacacgggcattggaggacacggaagctgctgctctgagatggatatctgggaggccaactccatctccgaggctcttaccccccacccttgcacgactgtcggccaggagatctgcgagggtgatgggtgcggcggaacttactccgataacagatatggcggcacttgcgatcccgatggctgcgactggaacccataccgcctgggcaacaccagcttctacggccctggctcaagctttaccctcgataccaccaagaaattgaccgttgtcacccagttcgagacgtcgggtgccatcaaccgatactatgtccagaatggcgtcactttccagcagcccaacgccgagcttggtagttactctggcaacgagctcaacgatgattactgcacagctgaggaggcagaattcggcggatcctctttctcagacaagggcggcctgactcagttcaagaaggctacctctggcggcatggttctggtcatgagtctgtgggatgatgtgagtttgatggacaaacatgcgcgttgacaaagagtcaagcagctgactgagatgttacagtactacgccaacatgctgtggctggactccacctacccgacaaacgagacctcctccacacccggtgccgtgcgcggaagctgctccaccagctccggtgtccctgctcaggtcgaatctcagtctcccaacgccaaggtcaccttctccaacatcaagttcggacccattggcagcaccggcaaccctagcggcggcaaccctcccggcggaaacccgcctggcaccaccaccacccgccgcccagccactaccactggaagctctcccggacctacccagtctcactacggccagtgcggcggtattggctacagcggccccacggtctgcgccagcggcacaacttgccaggtcctgaacccttactactctcagtgcctgtaa

SEQ ID NO: 385 - DNA, 1677 bp, Artificial
  Gene sequence with flanking sequences
catgtatcggaagttggccgtcatctcggccttcttggccacagctcgtgctcagtcggcctgcactctccaatcggagactcacccgcctctgacatggcagaaatgctcgtctggtggcacgtgcactcaacagacaggctccgtggtcatcgacgccaactggcgctggactcacgctacgaacagcagcacgaactgctacgatggcaacacttggagctcgaccctatgtcctgacaacgagacctgcgcgaagaactgctgtctggacggtgccgcctacgcgtccacgtacggagttaccacgagcggtaacagcctctccattggctttgtcacccagtctgcgcagaagaacgttggcgctcgcctttaccttatggcgagcgacacgacctaccaggaattcaccctgcttggcaacgagttctctttcgatgttgatgtttcgcagctgccgtaagtgacttaccatgaacccctgacgctatcttcttgttggctcccagctgactggccaattcaaggtgcggcttgaacggagctctctacttcgtgtccatggacgcggatggtggcgtgagcaagtatcccaccaacaccgctggcgccaagtacggcacggggtactgtgacagccagtgtccccgcgatctgaagttcatcaatggccaggccaacgttgagggctgggagccgtcatccaacaacgcgaacacgggcattggaggacacggaagctgctgctctgagatggatatctgggaggccaactccatctccgaggctcttaccccccacccttgcacgactgtcggccaggagatctgcgagggtgatgggtgcggcggaacttactccgataacagatatggcggcacttgcgatcccgatggctgcgactggaacccataccgcctgggcaacaccagcttctacggccctggctcaagctttaccctcgataccaccaagaaattgaccgttgtcacccagttcgagacgtcgggtgccatcaaccgatactatgtccagaatggcgtcactttccagcagcccaacgccgagcttggtagttactctggcaacgagctcaacgatgattactgcacagctgaggaggcagaattcggcggatcctctttctcagacaagggcggcctgactcagttcaagaaggctacctctggcggcatggttctggtcatgagtctgtgggatgatgtgagtttgatggacaaacatgcgcgttgacaaagagtcaagcagctgactgagatgttacagtactacgccaacatgctgtggctggactccacctacccgacaaacgagacctcctccacacccggtgccgtgcgcggaagctgctccaccagctccggtgtccctgctcaggtcgaatctcagtctcccaacgccaaggtcaccttctccaacatcaagttcggacccattggcagcaccggcaaccctagcggcggcaaccctcccggcggaaacccgcctggcaccaccaccaccgaggagccagccactaccactggaagctctcccggacctacccagtctcactacggccagtgcggcggtattggctacagcggccccacggtctgcgccagcggcacaacttgccaggtcctgaacccttactactctcagtgcctgtaa

SEQ ID NO: 386 - DNA, 41 bp, Artificial
  Primer sequence
gcggactgcgcatcgctagcatgtatcggaagttggccgtc

SEQ ID NO: 387 - DNA, 43 bp, Artificial
  Primer sequence
ttcgccacggagctggtaccttacaggcactgagagtagtaag

SEQ ID NO: 388 - DNA, 19 bp, Artificial
  Primer sequence
gttcgtagcgtgagtccag

SEQ ID NO: 389 - DNA, 41 bp, Artificial
  Primer sequence
  misc_feature (20)..(21): n is a, c, g, or t
ctggactcacgctacgaacnnsagcacgaactgctacgatg

SEQ ID NO: 390 - DNA, 23 bp, Artificial
  Primer sequence
gtagcagttcgtgctgctgttcg

SEQ ID NO: 391 - DNA, 48 bp, Artificial
  Primer sequence
  misc_feature (24)..(25): n is a, c, g, or t
cgaacagcagcacgaactgctacnnsggcaacacttggagctcgaccc

SEQ ID NO: 392 - DNA, 25 bp, Artificial
  Primer sequence
atcgtagcagttcgtgctgctgttc

SEQ ID NO: 393 - DNA, 46 bp, Artificial
  Primer sequence
  misc_feature (26)..(27): n is a, c, g, or t
gaacagcagcacgaactgctacgatnnsaacacttggagctcgacc

SEQ ID NO: 394 - DNA, 16 bp, Artificial
  Primer sequence
gccaatggagaggctg

SEQ ID NO: 395 - DNA, 43 bp, Artificial
  Primer sequence
  misc_feature (17)..(18): n is a, c, g, or t
cagcctctccattggcnnsgtcacccagtctgcgcagaagaac

SEQ ID NO: 396 - DNA, 22 bp, Artificial
  Primer sequence
agactgggtgacaaagccaatg

SEQ ID NO: 397 - DNA, 44 bp, Artificial
  Primer sequence
  misc_feature (23)..(24): n is a, c, g, or t
cattggctttgtcacccagtctnnscagaagaacgttggcgctc

SEQ ID NO: 398 - DNA, 22 bp, Artificial
  Primer sequence
ctgcgcagactgggtgacaaag

SEQ ID NO: 399 - DNA, 47 bp, Artificial
  Primer sequence
  misc_feature (23)..(24): n is a, c, g, or t
ctttgtcacccagtctgcgcagnnsaacgttggcgctcgcctttacc

SEQ ID NO: 400 - DNA, 18 bp, Artificial
  Primer sequence
gcaccttgaattggccag

SEQ ID NO: 401 - DNA, 39 bp, Artificial
  Primer sequence
  misc_feature (19)..(20): n is a, c, g, or t
ctggccaattcaaggtgcnnsttgaacggagctctctac

SEQ ID NO: 402 - DNA, 20 bp, Artificial
  Primer sequence
tccgttcaagccgcaccttg

SEQ ID NO: 403 - DNA, 46 bp, Artificial
  Primer sequence
  misc_feature (21)..(22): n is a, c, g, or t
caaggtgcggcttgaacggannsctctacttcgtgtccatggacgc

SEQ ID NO: 404 - DNA, 17 bp, Artificial
  Primer sequence
agctccgttcaagccgc

SEQ ID NO: 405 - DNA, 42 bp, Artificial
  Primer sequence
  misc_feature (18)..(19): n is a, c, g, or t
gcggcttgaacggagctnnstacttcgtgtccatggacgcgg

SEQ ID NO: 406 - DNA, 18 bp, Artificial
  Primer sequence
cagatcgcggggacactg

SEQ ID NO: 407 - DNA, 42 bp, Artificial
  Primer sequence
  misc_feature (19)..(20): n is a, c, g, or t
cagtgtccccgcgatctgnnsttcatcaatggccaggccaac

SEQ ID NO: 408 - DNA, 16 bp, Artificial
  Primer sequence
ggatgacggctcccag

SEQ ID NO: 409 - DNA, 38 bp, Artificial
  Primer sequence
  misc_feature (17)..(18): n is a, c, g, or t
ctgggagccgtcatccnnsaacgcgaacacgggcattg

SEQ ID NO: 410 - DNA, 17 bp, Artificial
  Primer sequence
cgcgttgttggatgacg

SEQ ID NO: 411 - DNA, 38 bp, Artificial
  Primer sequence
  misc_feature (18)..(19): n is a, c, g, or t
cgtcatccaacaacgcgnnsacgggcattggaggacac

SEQ ID NO: 412 - DNA, 16 bp, Artificial
  Primer sequence
ggcctcccagatatcc

SEQ ID NO: 413 - DNA, 39 bp, Artificial
  Primer sequence
  misc_feature (17)..(18): n is a, c, g, or t
ggatatctgggaggccnnstccatctccgaggctcttac

SEQ ID NO: 414 - DNA, 19 bp, Artificial
  Primer sequence
accctcgcagatctcctgg

SEQ ID NO: 415 - DNA, 40 bp, Artificial
  Primer sequence
  misc_feature (20)..(21): n is a, c, g, or t
ccaggagatctgcgagggtnnsgggtgcggcggaacttac

SEQ ID NO: 416 - DNA, 21 bp, Artificial
  Primer sequence
ggagtaagttccgccgcaccc

SEQ ID NO: 417 - DNA, 44 bp, Artificial
  Primer sequence
  misc_feature (22)..(23): n is a, c, g, or t
gggtgcggcggaacttactccnnsaacagatatggcggcacttg

SEQ ID NO: 418 - DNA, 23 bp, Artificial
  Primer sequence
atatctgttatcggagtaagttc

SEQ ID NO: 419 - DNA, 45 bp, Artificial
  Primer sequence
  misc_feature (24)..(25): n is a, c, g, or t
gaacttactccgataacagatatnnsggcacttgcgatcccgatg

SEQ ID NO: 420 - DNA, 18 bp, Artificial
  Primer sequence
atcgggatcgcaagtgcc

SEQ ID NO: 421 - DNA, 39 bp, Artificial
  Primer sequence
  misc_feature (19)..(20): n is a, c, g, or t
ggcacttgcgatcccgatnnstgcgactggaacccatac

SEQ ID NO: 422 - DNA, 16 bp, Artificial
  Primer sequence
ccagtcgcagccatcg

SEQ ID NO: 423 - DNA, 42 bp, Artificial
  Primer sequence
  misc_feature (17)..(18): n is a, c, g, or t
cgatggctgcgactggnnsccataccgcctgggcaacaccag

SEQ ID NO: 424 - DNA, 20 bp, Artificial
  Primer sequence
gagctcgttgccagagtaac

SEQ ID NO: 425 - DNA, 45 bp, Artificial
  Primer sequence
  misc_feature (21)..(22): n is a, c, g, or t
gttactctggcaacgagctcnnsgatgattactgcacagctgagg

SEQ ID NO: 426 - DNA, 20 bp, Artificial
  Primer sequence
agaggatccgccgaattctg

SEQ ID NO: 427 - DNA, 43 bp, Artificial
  Primer sequence
  misc_feature (21)..(22): n is a, c, g, or t
cagaattcggcggatcctctnnstcagacaagggcggcctgac

SEQ ID NO: 428 - DNA, 18 bp, Artificial
  Primer sequence
ccacagactcatgaccag

SEQ ID NO: 429 - DNA, 39 bp, Artificial
  Primer sequence
  misc_feature (19)..(20): n is a, c, g, or t
ctggtcatgagtctgtggnnsgatgtgagtttgatggac

SEQ ID NO: 430 - DNA, 19 bp, Artificial
  Primer sequence
gttggcgtagtactgtaac

SEQ ID NO: 431 - DNA, 40 bp, Artificial
  Primer sequence
  misc_feature (20)..(21): n is a, c, g, or t
gttacagtactacgccaacnnsctgtggctggactccacc

SEQ ID NO: 432 - DNA, 18 bp, Artificial
  Primer sequence
catgttggcgtagtactg

SEQ ID NO: 433 - DNA, 39 bp, Artificial
  Primer sequence
  misc_feature (19)..(20): n is a, c, g, or t
cagtactacgccaacatgnnstggctggactccacctac

SEQ ID NO: 434 - DNA, 19 bp, Artificial
  Primer sequence
gtccagccacagcatgttg

SEQ ID NO: 435 - DNA, 40 bp, Artificial
  Primer sequence
  misc_feature (20)..(21): n is a, c, g, or t
caacatgctgtggctggacnnsacctacccgacaaacgag

SEQ ID NO: 436 - DNA, 21 bp, Artificial
  Primer sequence
gtaggtggagtccagccacag

SEQ ID NO: 437 - DNA, 42 bp, Artificial
  Primer sequence
  misc_feature (22)..(23): n is a, c, g, or t
ctgtggctggactccacctacnnsacaaacgagacctcctcc

SEQ ID NO: 438 - DNA, 19 bp, Artificial
  Primer sequence
gtttgtcgggtaggtggag

SEQ ID NO: 439 - DNA, 42 bp, Artificial
  Primer sequence
  misc_feature (20)..(21): n is a, c, g, or t
ctccacctacccgacaaacnnsacctcctccacacccggtgc

SEQ ID NO: 440 - DNA, 20 bp, Artificial
  Primer sequence
tgtggaggaggtctcgtttg

SEQ ID NO: 441 - DNA, 40 bp, Artificial
  Primer sequence
  misc_feature (21)..(22): n is a, c, g, or t
caaacgagacctcctccacannsggtgccgtgcgcggaag

SEQ ID NO: 442 - DNA, 1585 bp, Artificial
  Gene sequence with flanking sequences
gcggactgcgcatcgctagcatgtatcggaagttggccgtcatctcggccttcttggccacagctcgtgctcagtcggcctgcactctccaatcggagactcacccgcctctgacatggcagaaatgctcgtctggtggcacgtgcactcaacagacaggctccgtggtcatcgacgccaactggcgctggactcacgctacgaacagcagcacgaactgctacgatggcaacacttggagctcgaccctatgtcctgacaacgagacctgcgcgaagaactgctgtctggacggtgccgcctacgcgtccacgtacggagttaccacgagcggtaacagcctctccattggctttgtcacccagtctgcgcagaagaacgttggcgctcgcctttaccttatggcgagcgacacgacctaccaggaattcaccctgcttggcaacgagttctctttcgatgttgatgtttcgcagctgccgtgcggcttgaacggagctctctacttcgtgtccatggacgcggatggtggcgtgagcaagtatcccaccaacaccgctggcgccaagtacggcacggggtactgtgacagccagtgtccccgcgatctgaagttcatcaatggccaggccaacgttgagggctgggagccgtcatccaacaacgcgaacacgggcattggaggacacggaagctgctgctctgagatggatatctgggaggccaactccatctccgaggctcttaccccccacccttgcacgactgtcggccaggagatctgcgagggtgatgggtgcggcggaacttactccgataacagatatggcggcacttgcgatcccgatggctgcgactggaacccataccgcctgggcaacaccagcttctacggccctggctcaagctttaccctcgataccaccaagaaattgaccgttgtcacccagttcgagacgtcgggtgccatcaaccgatactatgtccagaatggcgtcactttccagcagcccaacgccgagcttggtagttactctggcaacgagctcaacgatgattactgcacagctgaggaggcagaattcggcggatcctctttctcagacaagggcggcctgactcagttcaagaaggctacctctggcggcatggttctggtcatgagtctgtgggatgattactacgccaacatgctgtggctggactccacctacccgacaaacgagacctcctccacacccggtgccgtgcgcggaagctgctccaccagctccggtgtccctgctcaggtcgaatctcagtctcccaacgccaaggtcaccttctccaacatcaagttcggacccattggcagcaccggcaaccctagcggcggcaaccctcccggcggaaacccgcctggcaccaccaccaccgaggagccagccactaccactggaagctctcccggacctacccagtctcactacggccagtgcggcggtattggctacagcggccccacggtctgcgccagcggcacaacttgccaggtcctgaacccttactactctcagtgcctgtaaggtaccagctccgtggcgaa

SEQ ID NO: 443 - DNA, 1585 bp, Artificial
  Gene sequence with flanking sequences
gcggactgcgcatcgctagcatgtatcggaagttggccgtcatctcggccttcttggccacagctcgtgctcagtcggcctgcactctccaatcggagactcacccgcctctgacatggcagaaatgctcgtctggtggcacgtgcactcaacagacaggctccgtggtcatcgacgccaactggcgctggactcacgctacgaacagcagcacgaactgctacgatggcaacacttggagctcgaccctatgtcctgacaacgagacctgcgcgaagaactgctgtctggacggtgccgcctacgcgtccacgtacggagttaccacgagcggtaacagcctctccattggctttgtcacccagtctgcgcagaagaacgttggcgctcgcctttaccttatggcgagcgacacgacctaccaggaattcaccctgcttggcaacgagttctctttcgatgttgatgtttcgcagctgccgtgcggcttgaacggagctctctacttcgtgtccatggacgcggatggtggcgtgagcaagtatcccaccaacaccgctggcgccaagtacggcacggggtactgtgacagccagtgtccccgcgatctgaagttcatcaatggccaggccaacgttgagggctgggagccgtcatccaacaacgcgaacacgggcattggaggacacggaagctgctgctctgagatggatatctgggaggccaactccatctccgaggctcttaccccccacccttgcacgactgtcggccaggagatctgcgagggtgatgggtgcggcggaacttactccgataacagatatggcggcacttgcgatcccgatggctgcgactggaacccataccgcctgggcaacaccagcttctacggccctggctcaagctttaccctcgataccaccaagaaattgaccgttgtcacccagttcgagacgtcgggtgccatcaaccgatactatgtccagaatggcgtcactttccagcagcccaacgccgagcttggtagttactctggcaacgagctcaacgatgattactgcacagctgaggaggcagaattcggcggatcctctttctcagacaagggcggcctgactcagttcaagaaggctacctctggcggcatggttctggtcatgagtctgtgggatgattactacgccaacatgctgtggctggactccacctacccgacaaacgagacctcctccacacccggtgccgtgcgcggaagctgctccaccagctccggtgtccctgctcaggtcgaatctcagtctcccaacgccaaggtcaccttctccaacatcaagttcggacccattggcagcaccggcaaccctagcggcggcaaccctcccggcggaaacccgcctggcaccaccaccacccgccgcccagccactaccactggaagctctcccggacctacccagtctcactacggccagtgcggcggtattggctacagcggccccacggtctgcgccagcggcacaacttgccaggtcctgaacccttactactctcagtgcctgtaaggtaccagctccgtggcgaa

SEQ ID NO: 444 - DNA, 18 bp, Artificial
  Primer sequence
aagccgatgtcacacgcg

SEQ ID NO: 445 - DNA, 20 bp, Artificial
  Primer sequence
cagatcctccaggagacttg

SEQ ID NO: 446 - protein, 497 aa, Trichoderma reesei
QSACTLQSETHPPLTWQKCSSGGTCTQQTGSVVIDANWRWTHATNSSTNCYDGNTWSSTLCPDNETCAKNCCLDGAAYASTYGVTTSGNSLSIGFVTQSAQKNVGARLYLMASDTTYQEFTLLGNEFSFDVDVSQLPCGLNGALYFVSMDADGGVSKYPTNTAGAKYGTGYCDSQCPRDLKFINGQANVEGWEPSSNNANTGIGGHGSCCSEMDIWEANSISEALTPHPCTTVGQEICEGDGCGGTYSDNRYGGTCDPDGCDWNPYRLGNTSFYGPGSSFTLDTTKKLTVVTQFETSGAINRYYVQNGVTFQQPNAELGSYSGNELNDDYCTAEEAEFGGSSFSDKGGLTQFKKATSGGMVLVMSLWDDYYANMLWLDSTYPTNETSSTPGAVRGSCSTSSGVPAQVESQSPNAKVTFSNIKFGPIGSTGNPSGGNPPGGNPPGTTTTEEPATTTGSSPGPTQSHYGQCGGIGYSGPTVCASGTTCQVLNPYYSQCL
